(19) United States
(12) Patent Application Publication
(10) Pub. No.: US 2026/0209698 A1
(43) Pub. Date: Jul. 23, 2026

(54) MODIFIED CELL AND USE THEREOF

(71) Applicants: SUZHOU GRIT BIOTECHNOLOGY CO., LTD., Shanghai (CN); ZHUHAI TUOYU BIOTECHNOLOGY CO., LTD., Shanghai (CN); SHANGHAI GRIT BIOTECHNOLOGY CO., LTD., Shanghai (CN); SHENZHEN GRIT BIOTECHNOLOGY CO., LTD., Shanghai (CN)

(72) Inventors: Yarong LIU, Shanghai (CN); Jingwei SUN, Shanghai (CN); Yao SHENG, Shanghai (CN)

(21) Appl. No.: 19/136,209

(22) PCT Filed: Dec. 8, 2023
(86) PCT No.: PCT/CN2023/137333

§ 371 Date: Jun. 5, 2025

(30) Foreign Application Priority Data
Dec. 9, 2022 (WO) PCT/CN2022/137760
Dec. 9, 2022 (WO) PCT/CN2022/137761
Dec. 9, 2022 (WO) PCT/CN2022/137762
Dec. 9, 2022 (WO) PCT/CN2022/137763
Aug. 8, 2023 (WO) PCT/CN2023/111625

(51) Int. Cl. C12N 5/0783; A61K 35/17; A61P 35/00; C12N 9/22; C12N 15/11; C12N 15/90

(52) U.S. Cl. CPC C12N 5/0636; A61K 35/17; A61P 35/00; C12N 9/22; C12N 15/11; C12N 15/907; C12N 2310/20; C12N 2510/00

(57) ABSTRACT

The present invention relates to the field of biomedicine, and provides a modified cell and its uses. Specifically, the present invention relates to a method of culturing cells, comprising reducing the expression and/or activity of target genes. The present invention also relates to methods of preventing and/or treating a tumor using the cultured cells.

### TECHNICAL FIELD

[0001] The present invention relates to the field of biomedicine, and specifically to a modified cell and its uses.

### BACKGROUND

[0002] Currently, immunotherapy is an effective way to treat patients with poor prognosis. However, the immune cells used in immunotherapy have problems such as weak cell function or weak proliferation and survival capabilities after reinfusion into the body. Therefore, there is an urgent need for a modified immune cell and a robust and reliable immune cell culture method.

### CONTENTS OF THE INVENTION

[0003] The invention provides a method for cultivating cells, which has one or more of the following advantages: enhanced target cell killing ability, enhanced cell proliferation ability, enhanced cytokine release ability, increased proportion of activated cells, reduced proportion of regulatory cells, decreased proportion of exhausted cells, increased proportion of central memory cells and/or naive cells, decreased proportion of apoptotic cells and increased proportion of stem cell-like cells.

[0004] In one aspect, the present invention provides a method of culturing cells, the method comprising: reducing the expression and/or activity of members selected from the peptidase C64 family, the ZC3H12 family, the STAT-induced STAT inhibitor (SSI) family, and the CBL family.

[0005] In another aspect, the present invention provides a cell produced by the method of the present invention.

[0006] In another aspect, the present invention provides a pharmaceutical composition comprising the cells of the present invention, and optionally a pharmaceutically acceptable carrier.

[0007] In another aspect, the invention provides a method of affecting cell growth, comprising administering the cells of the invention and/or pharmaceutical compositions of the invention.

[0008] In another aspect, the invention provides the use of the cells of the invention and/or the pharmaceutical composition of the invention in the preparation of medicaments for preventing and/or treating diseases and/or symptoms.

[0009] Other aspects and advantages of the present invention will be readily apparent to those skilled in the art from the detailed description that follows. Only exemplary embodiments of the invention are shown and described in the following detailed description.

[0010] As those skilled in the art will realize, the present disclosure enables those skilled in the art to make changes to the specific embodiments disclosed without departing from the spirit and scope of the invention to which the invention relates. Accordingly, the drawings and description of the present invention are illustrative only and not restrictive.

### DESCRIPTION OF THE DRAWINGS

[0011] The features and advantages of the invention to which the present invention relates can be better understood by reference to the exemplary embodiments described in detail below and the accompanying drawings. A brief description of the drawings is as follows:

[0012] FIG. 1A shows the human TNFAIP3 gene editing target segment relative to the start codon provided by the present invention. For example, it can be a continuous region with more than about 3 transcription factor binding numbers; and it can be the exosome of the gene. subregion or intron region approximately 20 bp from the exon.

[0013] FIG. 1B shows the human ZC3H12A gene editing target segment relative to the start codon provided by the present invention. For example, it can be a continuous region with more than about 3 transcription factor binding numbers; and it can be the exosome of the gene. subregion or intronic region approximately 20 bp from the exon.

[0014] FIG. 1C shows the human SOCS1 gene editing target segment relative to the start codon provided by the present invention. For example, it can be a continuous region with a transcription factor binding number of about 3 or more; and it can be the exosome of the gene. subregion or intronic region approximately 20 bp from the exon.

[0015] FIG. 1D shows the human CBLB gene editing target segment relative to the start codon provided by the present invention. For example, it can be a continuous region with a transcription factor binding number of about 3 or more; and it can be the exosome of the gene. Subregion or intron approximately 20 bp from exon sub-region.

[0016] FIG. 2A shows the TCR-T amplification fold of TNFAIP3 gene editing in the non-stimulating medium group.

[0017] FIGS. 2B-2C show the TCR-T amplification fold of TNFAIP3 gene editing in the TransACT stimulation group.

[0018] FIGS. 2D-2G show the target cell killing ability of TCR-T cells derived from different donors after TNFAIP3 gene editing. FIGS. 2D and 2F show the killing curves at each time point, and FIGS. 2E and 2G show the killing status of each test group at the end of the test, which are all higher than the unedited NT group.

[0019] FIGS. 2H-2K show the various cytokine release capabilities of TNFAIP3 gene-edited TCR-T cells.

[0020] FIG. 3A shows the TCR-T amplification fold of ZC3H12A gene editing in the non-stimulating medium group.

[0021] FIG. 3B shows the TCR-T amplification fold of ZC3H12A gene editing in the TransACT stimulation group.

[0022] FIGS. 3C-3F show the target cell killing ability of ZC3H12A gene-edited TCR-T cells. FIGS. 3C and 3E show the killing curves at each time point, and FIGS. 3D and 3F show the killing status of each test group at the end of the test, which are all higher than the unedited NT group.

[0023] FIGS. 3G-3J show the various cytokine release capabilities of ZC3H12A gene-edited TCR-T cells.

[0024] FIG. 4A shows the TCR-T amplification fold of SOCS1 gene editing in the non-stimulating medium group.

[0025] FIG. 4B shows the TCR-T amplification fold of SOCS1 gene editing in the TransACT stimulation group.

[0026] FIG. 4C shows the amplification fold of SOCS1 gene-edited TILs derived from different donors in the non-stimulating medium group.

[0027] FIG. 4D shows the amplification fold of TIL derived from donor 306 edited by the SOCS1 gene in the TransACT stimulation group.

[0028] FIGS. 4E-4H show the target cell killing ability of SOCS1 gene-edited TCR-T cells.

[0029] FIG. 4I shows the target cell killing ability of SOCS1 gene-edited TIL cells.

[0030] FIG. 4J shows the cytokine expression of SOCS1 gene-edited TCR-T cells in the unstimulated group.

[0031] FIG. 4K shows the cytokine expression of SOCS1 gene-edited TCR-T cells in the CD3 antibody stimulation group.

[0032] FIG. 4L shows the cytokine release ability of SOCS1 gene-edited TCR-T cells co-cultured with A375 target cells.

[0033] FIG. 4M shows the cytokine expression of SOCS1 gene-edited TIL cells in the unstimulated group.

[0034] FIG. 4N shows the cytokine expression of SOCS1 gene-edited TIL cells in the TransACT stimulation group.

[0035] FIG. 4O shows that TIL cells after SOCS1 gene editing have a higher proportion of stem cells.

[0036] FIG. 4P shows that TIL cells after SOCS1 gene editing have a lower proportion of exhausted T cells.

[0037] FIGS. 5A-5B show the TCR-T amplification fold of CBLB gene editing in the non-stimulating medium group.

[0038] FIGS. 5C-5D show the TCR-T amplification fold of CBLB gene editing in the TransACT stimulation group.

[0039] FIGS. 5E-5H show the target cell killing ability of CBLB gene-edited TCR-T cells.

[0040] FIGS. 5E and 5G show the killing curves at each time point, and FIGS. 5F and 5H show the killing status of each test group at the end of the test, which are all higher than the unedited NT group.

[0041] FIGS. 5I-5L show various cytokine release capabilities of CBLB gene-edited TCR-T cells.

[0042] FIG. 6A shows the TIL amplification fold of combined gene editing of CBLB and ZC3H12A in the non-stimulating medium group.

[0043] FIG. 6B shows the TIL amplification fold of SOCS1 and CBLB combined gene editing in the non-stimulating medium group.

[0044] FIG. 6C shows the TIL amplification fold of SOCS1 and TNFAIP3 combined gene editing in the non-stimulating medium group.

[0045] FIG. 6D shows the TIL amplification fold of SOCS1 and TNFAIP3 combined gene editing in the CD3 antibody stimulation group.

[0046] FIG. 6E shows the TIL amplification fold of combined gene editing of SOCS1 and ZC3H12A in the non-stimulating medium group.

[0047] FIG. 6F shows the TIL amplification fold of combined gene editing of SOCS1 and ZC3H12A in the CD3 antibody stimulation group.

[0048] FIG. 6G shows the TIL amplification fold of TNFAIP3 and CBLB combined gene editing in the non-stimulating medium group.

[0049] FIG. 6H shows the TIL amplification fold of TNFAIP3 and ZC3H12A combined gene editing in the non-stimulating medium group.

[0050] FIG. 6I shows the TIL amplification fold of TNFAIP3 and ZC3H12A combined gene editing in the CD3 antibody stimulation group.

[0051] FIG. 6J shows the TIL amplification fold of TNFAIP3 and SOCS1 combined gene editing in the non-stimulating medium group.

[0052] FIG. 6K shows the TIL amplification fold of TNFAIP3 and SOCS1 combined gene editing in the TransACT antibody stimulation group.

[0053] FIG. 7A shows the target cell killing ability of TIL cells edited in both CBLB and ZC3H12A genes.

[0054] FIG. 7B shows the target cell killing ability of TIL cells edited in both CBLB and ZC3H12A genes.

[0055] FIG. 7C shows the target cell killing ability of TIL cells edited in both SOCS1 and CBLB genes.

[0056] FIG. 7D shows the target cell killing ability of TIL cells edited in both SOCS1 and CBLB genes.

[0057] FIG. 7E shows the target cell killing ability of TIL cells edited in both SOCS1 and CBLB genes.

[0058] FIG. 7F shows the target cell killing ability of TIL cells edited in both SOCS1 and TNFAIP3 genes.

[0059] FIG. 7G shows the target cell killing ability of TIL cells edited in both SOCS1 and TNFAIP3 genes.

[0060] FIG. 7H shows the target cell killing ability of TIL cells edited in both SOCS1 and TNFAIP3 genes.

[0061] FIG. 7I shows the target cell killing ability of TIL cells edited in both SOCS1 and TNFAIP3 genes.

[0062] FIG. 7J shows the target cell killing ability of TIL cells edited in both SOCS1 and ZC3H12A genes.

[0063] FIG. 7K shows the target cell killing ability of TIL cells edited in both SOCS1 and ZC3H12A genes.

[0064] FIG. 7L shows the target cell killing ability of TIL cells edited in both SOCS1 and ZC3H12A genes.

[0065] FIG. 7M shows the target cell killing ability of TIL cells edited in both TNFAIP3 and CBLB genes.

[0066] FIG. 7N shows the target cell killing ability of TIL cells edited in both TNFAIP3 and CBLB genes.

[0067] FIG. 7O shows the target cell killing ability of TIL cells edited in both TNFAIP3 and ZC3H12A genes.

[0068] FIG. 7P shows the target cell killing ability of TIL cells edited in both TNFAIP3 and ZC3H12A genes.

[0069] FIG. 7Q shows the target cell killing ability of TIL cells edited in both TNFAIP3 and ZC3H12A genes.

[0070] FIG. 7R shows the target cell killing ability of TIL cells edited in both TNFAIP3 and ZC3H12A genes.

[0071] FIG. 7S shows the target cell killing ability of TIL cells edited in both TNFAIP3 and SOCS1 genes.

[0072] FIG. 7T shows the killing ability of TIL cells edited in both TNFAIP3 and SOCS1 genes against autologous tumor organoids.

[0073] FIG. 8A shows that TIL cells edited in both CBLB and ZC3H12A genes have a lower proportion of exhausted T cells.

[0074] FIG. 8B shows that TIL cells edited in both SOCS1 and CBLB genes have a higher proportion of central memory T cells.

[0075] FIG. 8C shows that TIL cells edited in both SOCS1 and CBLB genes have a lower proportion of exhausted T cells.

[0076] FIG. 8D shows that TIL cells edited in both SOCS1 and TNFAIP3 genes have a higher proportion of central memory T cells.

[0077] FIG. 8E shows that TIL cells edited in both SOCS1 and TNFAIP3 genes have a lower proportion of exhausted T cells.

[0078] FIG. 8F shows that TIL cells edited in both SOCS1 and ZC3H12A genes have a higher proportion of central memory T cells.

[0079] FIGS. 8G-8H show that TIL cells edited in both SOCS1 and ZC3H12A genes have a lower proportion of exhausted T cells.

[0080] FIG. 8I shows that TIL cells edited in both TNFAIP3 and CBLB genes have a lower proportion of exhausted T cells.

[0081] FIG. 8J shows that TIL cells edited in both TNFAIP3 and ZC3H12A genes have a higher proportion of naive T cells.

[0082] FIG. 8K shows that TIL cells edited in both TNFAIP3 and ZC3H12A genes have a higher proportion of central memory T cells.

[0083] FIGS. 8L-8M show that TIL cells edited in both TNFAIP3 and ZC3H12A genes have a lower proportion of exhausted T cells.

[0084] FIG. 8N shows that TIL cells edited in both TNFAIP3 and SOCS1 genes have a higher proportion of stem cells.

[0085] FIG. 8O shows that TIL cells edited in both TNFAIP3 and SOCS1 genes have a lower proportion of exhausted T cells.

[0086] FIG. 9A shows that the TIL cells edited in both CBLB and ZC3H12A genes in the CD3 antibody stimulation group had a higher proportion of cytokine expression.

[0087] FIG. 9B shows that the TIL cells after gene editing of SOCS1 and CBLB combination in the non-stimulation Medium group had a higher proportion of cytokine expression.

[0088] FIG. 9C shows that TIL cells after SOCS1 and CBLB combination gene editing in the CD3 antibody stimulation group had a higher proportion of cytokine expression.

[0089] FIG. 9D shows that TIL cells after gene editing of SOCS1 and TNFAIP3 combination in the non-stimulation Medium group had a higher proportion of cytokine expression.

[0090] FIG. 9E shows that TIL cells after gene editing of SOCS1 and TNFAIP3 combination in the CD3 antibody stimulation group had a higher proportion of cytokine expression.

[0091] FIG. 9F shows that the TIL cells after gene editing of SOCS1 and ZC3H12A combination in the non-stimulation Medium group had a higher proportion of cytokine expression.

[0092] FIG. 9G shows that the TIL cells after gene editing of SOCS1 and ZC3H12A combination in the CD3 antibody stimulation group had a higher proportion of cytokine expression.

[0093] FIG. 9H shows that the TIL cells after gene editing of TNFAIP3 and CBLB combination in the non-stimulation Medium group had a higher proportion of cytokine expression.

[0094] FIG. 9I shows that the TIL cells after gene editing of TNFAIP3 and CBLB combination in the CD3 antibody stimulation group had a higher proportion of cytokine expression.

[0095] FIGS. 9J-9K show that the TIL cells after gene editing of TNFAIP3 and ZC3H12A combination in the non-stimulation Medium group have a higher proportion of cytokine expression.

[0096] FIG. 9L shows that TIL cells after gene editing of TNFAIP3 and ZC3H12A combination in the CD3 antibody stimulation group had a higher proportion of cytokine expression.

[0097] FIG. 9M shows that TIL cells genetically edited with the combination of TNFAIP3 and SOCS1 co-cultured with autologous tumor organoids have higher cytokine release capacity.

[0098] FIG. 10 shows the results of apoptosis detection of TIL cells derived from donor 504.

### SPECIFIC EMBODIMENTS

[0099] The implementation of the present invention will be described below with specific examples. Those skilled in the art can easily understand other advantages and effects of the present invention from the content disclosed in this specification.

### Definitions

[0100] In the present invention, the term “CBL family member” generally refers to a family member protein having an SH3 domain or a functionally active fragment thereof. For example, a CBL family member may include CBLB. For example, the UniProt number for a CBL family member could be Q13191. The CBL family members of the present invention may also encompass functionally active fragments thereof, without being limited to human and mammalian forms, conservative amino acid substitutions, glycoform modifications or variants, active fragments thereof, or processing and/or modifications thereof that occur in cells Substances containing functionally active fragments produced later. For example, the CBL family members of the present invention may include functionally active fragments thereof and other optional structural domains.

[0101] In the present invention, the term “STAT-induced STAT inhibitor (SSI) family member” generally refers to a family member protein having an SH2 domain or a functionally active fragment thereof. For example, a member of the STAT-inducible STAT inhibitor (SSI) family may include SOCS1. For example, the UniProt number for a member of the STAT-induced STAT inhibitor (SSI) family may be 015524. The STAT-induced STAT inhibitor (SSI) family members of the present invention may also include functionally active fragments thereof, which are not limited to human and mammalian forms, conservative amino acid substitutions, glycoform modifications or variants, active fragments thereof, or their expression in cells. A substance containing the functionally active fragment resulting from the processing and/or modification that occurs in the substance. For example, the STAT-induced STAT inhibitor (SSI) family members of the present invention may include functionally active fragments thereof and other optional structural domains.

[0102] In the present invention, the term “peptidase C64 family member” generally refers to a family member protein with a ubiquitin-binding domain or a functionally active fragment thereof. For example, a peptidase C64 family member may include TNFAIP3. For example, the UniProt number for a member of the peptidase C64 family may be P21580. The peptidase C64 family members of the present invention can also include functionally active fragments thereof, which are not limited to human and mammalian forms, conservative amino acid substitutions, glycoform modifications or variants, active fragments thereof, or their processing and/or processes that occur in cells or a modified substance containing the functionally active fragment. For example, the peptidase C64 family member of the present invention may include its functionally active fragment and other optional structural domains.

[0103] In the present invention, the term “ZC3H12 family member” generally refers to a family member protein having a C3H1-type zinc finger domain or a functionally active fragment thereof. For example, a ZC3H12 family member may include ZC3H12A. For example, the UniProt number for a ZC3H12 family member could be Q5D1E8. The ZC3H12 family members of the present invention may also encompass functionally active fragments thereof, which are not limited to human and mammalian forms, conservative amino acid substitutions, glycoform modifications or variants, active fragments thereof, or processing and/or modifications thereof that occur in cells Substances containing functionally active fragments produced later. For example, the ZC3H12 family members of the present invention may include functionally active fragments thereof and other optional structural domains.

[0104] In the present invention, the term “IKAROS zinc finger protein family member” generally refers to family member proteins having zinc finger domains or functionally active fragments thereof. For example, a member of the zinc finger protein family including IKAROS may include IKZF1. For example, the UniProt number for a member of the IKAROS zinc finger protein family could be Q13422. The IKAROS zinc finger protein family members of the present invention may also include functionally active fragments thereof, without being limited to human and mammalian forms, conservative amino acid substitutions, glycoform modifications or variants, active fragments thereof, or processes and/or modifications thereof that occur in cells, including the functional activity fragments of matter. For example, the IKAROS zinc finger protein family members of the present invention may include functionally active fragments thereof and other optional structural domains.

[0105] In the present invention, the term “tumor necrosis factor alpha-induced protein 3 (TNFAIP3)” generally refers to an inhibitory molecule of a signaling pathway. For example, TNFAIP3 can ubiquitinate signal transduction substances of the NF-κB pathway. For example, the UniProt accession number for TNFAIP3 could be P21580. In the present invention, TNFAIP3 may encompass unprocessed TNFAIP3, any form of processed TNFAIP3, variants of TNFAIP3 or substances containing functionally active fragments of TNFAIP3.

[0106] In the present invention, the term “GTPase-activating protein 1 family member” generally refers to a family member protein having a GTPase-activating domain or a functionally active fragment thereof. For example, a GTPase-activating protein 1 family member may include RASA2. For example, the UniProt number for a member of the GTPase-activating protein 1 family may be Q15283. The GTPase-activating protein 1 family members of the present invention can also include functionally active fragments thereof, which are not limited to human and mammalian forms, conservative amino acid substitutions, glycoform modifications or variants, active fragments thereof, or their processing in cells, and/or modified substances containing the functionally active fragment. For example, the GTPase-activating protein 1 family member of the present invention may include its functionally active fragment and other optional structural domains.

[0107] In the present invention, the term “FGF binding protein family member” generally refers to a family member protein having an FGF binding domain or a functionally active fragment thereof. For example, an FGF binding protein family member may include FIBP. For example, the UniProt number for a member of the FGF binding protein family may be 043427. The FGF-binding protein family members of the present invention may also encompass functionally active fragments thereof, not limited to human and mammalian forms, conservative amino acid substitutions, glycoform modifications or variants, active fragments thereof, or their processing and/or processes that occur in cells. Or a modified substance containing the functionally active fragment. For example, the FGF-binding protein family members of the present invention may include functionally active fragments thereof and other optional structural domains.

[0108] In the present invention, the term “Mediator (MED) family member” generally refers to a family member protein having a CDK8 binding domain or a functionally active fragment thereof. For example, a family member containing Mediator (MED) could contain MED12. For example, the UniProt number of a Mediator (MED) family member may be Q93074. The Mediator (MED) family members of the present invention can also include functionally active fragments thereof, which are not limited to human and mammalian forms, conservative amino acid substitutions, glycoform modifications or variants, active fragments thereof, or their processing and processing in cells/or modified substances containing the functionally active fragment. For example, the Mediator (MED) family members of the present invention may include functionally active fragments thereof and other optional structural domains.

[0109] In the present invention, the term “immune cells” generally refers to cells involved in conducting innate and adaptive immune responses. For example, may include, but are not limited to, lymphocytes (such as T cells (including thymocytes) and B cells), natural killer (NK) cells, NKT cells, macrophages, monocytes, eosinophils, basophils cells, neutrophils, dendritic cells, and mast cells. In some embodiments, the modified immune effector cells are T cells, such as CD4+ T cells, CD8+ T cells (also known as cytotoxic T cells or CTL), regulatory T cells (Treg), Th1 cells, Th2 cells, Th17 cells, αβ T cells and/or γδ T cells. For example, the immune cells of the present invention also include immune cells derived from differentiation of stem cells. For example, the immune cells of the present invention also include immune cells derived from differentiation of pluripotent stem cells. For example, the stem cells of the present invention can be obtained by induction. For example, the above-mentioned stem cells of the present invention may include induced pluripotent stem cells (iPSC).

[0110] In the present invention, the term “chimeric antigen receptor” generally refers to an engineered antigen receptor. For example, a CAR may comprise an extracellular antigen binding domain fused via a hinge and transmembrane domain to a cytoplasmic domain comprising a signaling domain. In some embodiments, the CAR extracellular domain can bind to an antigen expressed by a target cell in an MHC-independent manner, resulting in activation and proliferation of the cell. In some embodiments, the extracellular domain of the CAR can recognize a tag fused to an antibody or antigen-binding fragment thereof. For example, a single CAR construct can be made to target multiple different antigens by replacing one antibody with another. In some embodiments, the extracellular domain of the CAR may comprise an antibody derived from antigen-binding fragments. Antigen binding domains useful in the present disclosure may include, for example, scFv, antibodies, antigen binding regions of antibodies, variable regions of heavy/light chains, and/or single chain antibodies.

[0111] In the present invention, the term “T cell receptor” generally refers to an engineered antigen receptor. For example, a TCR may comprise TCRα and/or TCRβ chains that have been isolated and cloned from a population of T cells that recognize a specific target antigen. For example, TCRα and/or TCRβ genes (i.e., TRAC and TRBC) can be obtained from T cell populations isolated from individuals with specific malignancies or from T cells that have been isolated from humanized mice immunized with specific tumor antigens or tumor cells, cloned from the population. Engineered TCRs can recognize antigens through the same mechanism as their endogenous counterparts (e.g., by recognizing their cognate antigens presented in the context of major histocompatibility complex (MHC) proteins expressed on the target cell surface), thereby can lead to activation and proliferation of TCR-engineered cells.

[0112] In the present invention, the term “gene regulatory system” generally refers to a system that regulates the expression or activity of a target gene. For example, a gene regulatory system may include gene regulatory molecules. For example, a gene regulatory system can regulate the expression or activity of a gene, such as placing the gene in an inactivated or activated state, increasing or decreasing the amount of the gene, increasing or decreasing the amount of transcription of the gene, and/or causing the gene to be in a state of inactivation or activation. The transcription product of the gene is in an inactive or activated state; for example, the gene regulatory system can regulate the expression or activity of the gene, such as increasing or decreasing the amount of the expression product of the gene in a single cell and/or causing the number of cells expressing the product of the gene to increase or decrease.

[0113] In the present invention, the term “guide nucleic acid molecule” generally refers to a nucleic acid molecule that can be used for gene editing. For example, guide nucleic acid molecules can provide information about nucleotide insertion or deletion, guiding the editing process. For example, the guide nucleic acid molecule can be a guide RNA (gRNA). For example, “gRNA” may refer to an RNA molecule that binds to a Cas protein and targets the Cas protein to a specific location within target DNA. For example, where hybridization between the gRNA and the DNA targeting sequence promotes the formation of the CRISPR complex, perfect complementarity may not be required, for example, as long as sufficient complementarity exists to cause hybridization and promote the formation of the CRISPR complex.

[0114] In the present invention, the term “enzyme protein” generally refers to a protein with enzymatic activity. For example, the enzyme protein may refer to Cas protein. For example, Cas proteins can contain at least one RNA recognition or binding domain that can interact with gRNA. Cas proteins may also include nuclease domains (e.g., DNase or RNase domains), DNA binding domains, helicase domains, protein-protein interaction domains, dimerization domains, and/or other structural areas. The nuclease domain may have catalytic activity for nucleic acid cleavage. Cleavage can involve the cleavage of covalent bonds in the nucleic acid molecule. The Cas protein can be a wild-type protein (ie, a naturally occurring protein), a modified Cas protein (ie, a Cas protein variant), or a fragment of a wild-type or modified Cas protein. Cas proteins can also be active variants or fragments of wild-type or modified Cas proteins. In the present invention, Cas protein may include unprocessed Cas protein, any form of processed Cas protein, variants of Cas protein, or substances containing functionally active fragments of Cas protein.

[0115] In the present invention, the term “ribonucleoprotein complex” generally refers to a complex formed between a protein and a nucleic acid. For example, proteins in ribonucleoprotein complexes can have nuclease activity. For example, a ribonucleoprotein complex can cleave a target sequence under the guidance of the nucleic acid within it. For example, the ribonucleoprotein complex may be a complex formed by Cas protein and gRNA.

[0116] In the present invention, the term “lipid nanoparticle (LNP)” generally refers to a lipid-nucleic acid particle or nucleic acid-lipid particle. For example, LNP represents particles made of lipids (e.g., cationic lipids, noncationic lipids, and conjugated lipids that prevent particle aggregation) and nucleic acids (e.g., mRNA, gRNA, siRNA, aiRNA, miRNA, ssDNA, dsDNA, ssRNA, short hairpin RNA (shRNA), dsRNA, self-amplifying RNA or plasmids, including plasmids from which interfering RNA or mRNA is transcribed, are encapsulated in lipids. For example, the protein can be encapsulated in LNP, for example, the Cas protein known in the art can be encapsulated in LNP. For example, lipids in LNP include (1) “simple lipids,” which include fats and oils as well as waxes; (2) “complex lipids,” which include phospholipids and glycolipids; and (3) “derivatized lipids,” such as steroids. For example, lipids in LNPs may also include lipid derivatives, such as lipids that are covalently or non-covalently bound to proteins or polypeptides. For example, the components in the LNP may also include polypeptide components. The polypeptide component can replace one or more lipid components in traditional LNP to maintain or improve the delivery ability of LNP.

[0117] In the present invention, the term “exon” generally refers to the portion of a gene that can be expressed as a protein. For example, an exon may refer to the ability to be expressed as a protein during protein biosynthesis. For example, splicing exon sequences of a target gene can reduce the activity or function of the target gene.

[0118] In the present invention, the term “intron” generally refers to a segment of DNA that does not encode part or all of the expressed protein. Normally under endogenous conditions, introns are transcribed into RNA molecules, but they are cleaved from the endogenous RNA before being translated into proteins. For example, editing at the location of an intron can reduce the activity or function of a target gene. For example, editing can reduce the activity or function of the target gene by targeting the junction of introns and exons, such as the intron region from about 0 bp to about 100 bp upstream or downstream of the exon, preferably about 0 bp to about 20 bp.

[0119] In the present invention, the term “start codon” generally refers to the unit of adjacent nucleotides (‘codon’) that genetically defines the start of protein synthesis (mRNA translation). For example, targeting the region 0 bp to 1500 bp upstream of the start codon, preferably 0 bp to 100 bp upstream of the start codon, for editing can reduce the activity or function of the target gene.

[0120] In the present invention, the term “protospacer adjacent motif (PAM)” generally refers to the short sequence following the target sequence. For example, when Cas9 performs site-specific cleavage of target DNA, the PAM sequence can be used to determine the location of the cleavage. For example, once the region of PAM is determined, those skilled in the art can easily determine the location of a suitable target sequence, and can easily design a gRNA sequence for cleaving the target sequence.

[0121] In the present invention, the term “reduced expression” generally refers to a decrease in the expression level of a product or its gene and/or a decrease in the proportion of cells capable of expressing the product (eg, at least about 5-100%). For example, it can be that the amount of the product expressed by the gene in the cell is reduced or that it contains the product expressed by the gene. The proportion of cells producing the product decreases, or the proportion of cells secreting the product expressed by the gene decreases. For example, the reduced expression of the gene can be indirectly expressed by detecting the knockout amount of the gene in the genome of the cell. For example, the reduced expression of a gene can be indirectly expressed by detecting the proportion of cells in a cell population in which the gene has been knocked out.

[0122] In the present invention, the term “activity” generally refers to the biological function of a substance. For example, the activity of a gene may refer to the transcriptional and/or translational state of the gene. For example, the weakened activity of a gene (eg, at least about 5-100%) may mean that the transcriptional function of the gene is weakened, the gene cannot be transcribed normally, or the function of the gene's transcript product is inhibited.

[0123] In the present invention, the term “CD80” generally refers to a cell stimulating molecule. For example, CD80 can be a ligand for CD28. For example, CD80 can be found in GenBank accession number P33681. The CD80 protein of the present invention may also include functionally active fragments thereof, and is not limited to substances containing functionally active fragments of CD80 produced after processing and/or modification occurring in cells. For example, the CD80 of the present invention may include functionally active fragments of CD80 and other optional structural domains.

[0124] In the present invention, the term “CD86” generally refers to a cell stimulating molecule. For example, CD86 can be a ligand for CD28. For example, CD86 can be found in GenBank accession number P42081. The CD86 protein of the present invention may also include functionally active fragments thereof, and is not limited to substances containing functionally active fragments of CD86 produced after processing and/or modification occurring in cells. For example, the CD86 of the present invention may include functionally active fragments of CD86 and other optional domains.

[0125] In the present invention, the term “secreted” generally refers to a substance that can be localized extracellularly. For example, secreted substances can be synthesized within the cell and transported to the extracellular space of the cell. For example, whether a substance is a secreted substance can be tested by an enzyme-linked immunosorbent assay or other detection method.

[0126] In the present invention, the term “T cell receptor” or “TCR” generally refers to a complex of membrane proteins involved in the activation of T cells in response to presentation of antigen. TCRs can be responsible for recognizing antigens bound to major histocompatibility complex molecules. TCR can consist of heterodimers composed of alpha (α) and beta (β) chains, or of gamma (γ) and delta (δ) chains. TCRs can exist in alpha/beta and gamma/delta forms, which are structurally similar but have unique anatomical locations and functions. For example, the TCR can be a modified TCR on any cell that expresses the TCR. For example, the type of TCR can be analyzed using a TCR subtype analysis reagent.

[0127] In the present invention, the term “clonal diversity” generally refers to a substance having multiple clonotypes. For example, clonal diversity of TCRs may mean that TCRs may have different sequence structures and/or antigen recognition capabilities. For example, the diversity of TCRs is often distinguished by β chain subtypes, which can include Vβ23, Vβ7.2, Vβ5.2, Vβ11, Vβ16, Vβ3, etc. When a T cell population has more β chain subtypes, this T cell population is believed to have higher clonal diversity.

[0128] In the present invention, “CD4⁺ Cells” usually refer to CD4-positive cells, which may be T cells, for example. The term “CD4⁺ cells” and “CD4-positive cells” may be used synonymously. These cells can be identified by methods known in the art, such as by staining the cells with fluorescently labeled antibodies against CD4 and using fluorescence-activated cell sorting. For example, there are data that can prove that increasing the proportion of CD4+ cells can increase the ability of the cell population to secrete IFN and/or TNF, and can improve the tumor-suppressing effect of the T cell population. For example, see Tay, R. E., Richardson, E. K. et al. (2020). Cancer Gene Therapy, 1-13. However, the art lacks a method to improve the CD4+ cell ratio; the present invention can provide a method that affects the CD4⁺ cell proportion.

[0129] In the present invention, “CD8⁺ Cells” usually refer to CD8-positive cells, which may be T cells, for example. The term “CD8⁺ cells” and “CD8-positive cells” may be used synonymously. These cells may be identified by methods known in the art, such as by staining the cells with fluorescently labeled antibodies directed against CD8 and using fluorescence-activated cell sorting.

[0130] In the present invention, the term “IC₅₀ value” usually refers to the concentration of a target substance required to obtain 50% inhibition of a biological process. The Cheng-Prusoff equation (Biochem. Pharmacol. (1973) 22:3099) can be used to convert the IC50 value into an absolute inhibition constant (Ki).

[0131] In the present invention, the term “K_{D} value” or “KD value” usually refers to the dissociation constant, which can be determined by surface plasmon resonance. Typically, surface plasmon resonance analysis uses the BIAcore system (Pharmacia Biosensor, Piscataway, NJ), by surface plasmon resonance (SPR). Measuring real-time binding interactions between ligands (substances immobilized on the biosensor matrix) and analytes (substances in solution) can also be achieved by immobilizing the analyte (substances immobilized on the biosensor matrix) and presenting them to ligands for surface plasmon analysis.

[0132] In the present invention, the term “encoding” generally refers to the ability to directly or indirectly infer the structure or composition information of another type of molecule related to it from the structure or composition information of one molecule according to basically determined rules. For example, the nucleotide sequence can be inferred from the sequence of an amino acid, such as from the properties of DNA-transcribing complementary nucleic acids, including nucleic acids that can be translated into polypeptides. For example, deoxyribonucleic acid may encode RNA transcribed from the deoxyribonucleic acid. Deoxyribonucleic acid may similarly encode a polypeptide translated from the RNA transcribed from the deoxyribonucleic acid.

[0133] As used herein, the term “small molecule compound” generally refers to peptides, peptidomimetics, amino acids, amino acid analogs, polynucleotides, polynucleotide analogs, nucleotides, nucleotide analogs, organic or inorganic substances having a molecular weight of less than about 10,000 g/mol (i.e., including heterologous organic substances and organometallic compounds), organic or inorganic substances with a molecular weight of less than about 5,000 g/mol, organic or inorganic substances with a molecular weight of less than about 1,000 g/mol, organic or inorganic substances with a molecular weight of less than about 500 g/mol, as well as salts, esters and other pharmaceutically acceptable forms of such drugs.

[0134] In the present invention, the term “NK cell” is also called “natural killer cell” and generally refers to a cell with large granules in the cytoplasm. NK cells are developed from bone marrow lymphoid stem cells and can differentiate and develop depending on the bone marrow or thymus microenvironment. In the present invention, the ratio of NK cells in TIL cells can be changed by the method of the present invention.

[0135] In the present invention, the term “antibody” generally refers to an immunoglobulin or fragment thereof or derivative thereof, encompassing any polypeptide including an antigen-binding site, whether produced in vitro or in vivo. The term includes, but is not limited to, polyclonal, monoclonal, monospecific, multispecific, nonspecific, humanized, single chain, chimeric, synthetic, recombinant, hybrid, mutant and grafted antibodies. Unless otherwise modified by the term “intact”, as in “intact antibody”, for the purposes of the present invention, the term “antibody” also includes antibody fragments, such as Fab, F(ab′)2, Fv, scFv, Fd, dAbs and other antibody fragments that retain antigen-binding functionality (e.g., specifically bind CD3). Typically, such fragments should include an antigen-binding domain. The basic 4-chain antibody unit is a heterotetrameric glycoprotein composed of two identical light (L) chains and two identical heavy (H) chains. IgM antibodies are composed of 5 basic heterotetramer units and another polypeptide called J chain, and contain 10 antigen-binding sites, while IgA antibodies include 2-5 basic units that can combine with the J chain and polymerize to form a multivalent combined basic 4-chain unit. For IgG, a 4-chain unit is typically about 150,000 daltons. Each L chain is connected to the H chain by a covalent disulfide bond, while the two H chains are connected to each other by one or more disulfide bonds depending on the H chain isotype. Each H and L chain also has regularly spaced intrachain disulfide bridges. Each H chain has a variable domain (VH) at the N-terminus, followed by three constant domains (CH) for each of the α and γ chains, and four CH domains for the μ and ε isoforms. Each L chain has a variable domain (VL) at the N-terminus and a constant domain at its other end. VL corresponds to VH, and CL corresponds to the first constant domain (CH1) of the heavy chain. Specific amino acid residues are thought to form the interface between the light and heavy chain variable domains. VH and VL pair together to form a single antigen binding site. L chains from any vertebrate species can be classified into one of two distinct types, termed kappa and lambda, based on the amino acid sequence of their constant domains. Immunoglobulins can be divided into different classes or isotypes based on the amino acid sequence of the heavy chain (CH) constant domain. There are currently five classes of immunoglobulins: IgA, IgD, IgE, IgG, and IgM, with heavy chains named α, δ, ε, γ and μ, respectively.

[0136] In the present invention, the term “antigen-binding fragment” generally refers to one or more polypeptide fragments that have the ability to specifically bind an antigen. In the present invention, the antigen-binding fragment may include Fab, Fab′, F(ab)2, Fv, F(ab′)2, scFv, di-scFv and/or dAb.

[0137] In the present invention, the term “expression” generally refers to the transcription and/or translation process that occurs within a cell of a gene encoding a target polypeptide. The level of transcription of a gene encoding a polypeptide of interest in a host cell can be determined by measuring the amount of corresponding mRNA present in the cell. For example, the mRNA transcribed from the gene encoding the polypeptide of interest is quantitatively measured by PCR or by RNA hybridization. The translation level of a gene encoding a polypeptide of interest can be measured by a variety of methods, such as by ELISA, by polypeptide biological activity testing, or by Western blotting or radioimmunoassays. In the present invention, the term “expression” may also generally refer to the process of transcription and/or translation in which a product occurs. For example, expression of a cytokine can be a process by which a cell transcribes and/or translates the cytokine. For example, the expression of a cytokine can be determined by detecting the amount of the corresponding mRNA present in the cell or detecting the amount of the cytokine produced by the cell, or both.

[0138] In the present invention, the “stage” in the terms “one stage of in vitro amplification”, “single stage of in vitro amplification”, or “first stage of in vitro amplification” generally refers to a period of amplification of TIL in vitro. In one embodiment, each stage can be divided by changes in the number of TIL cells. In one embodiment, when the number of TIL cells increases at least about 1-fold, the TIL cells can be considered to have entered the next stage of in vitro amplification. In some embodiments, when the number of TIL cells increases at least about 1-50 times, such as at least about 1-fold, at least about 2-fold, at least about 3-fold, at least about 4-fold, at least about 5-fold, at least about 6-fold, at least about 7 times, at least about 8 times, at least about 9 times, at least about 10 times, at least about 11 times, at least about 12 times, at least about 13 times, at least about 14 times, at least about 15 times, at least about 20 times, at least about 30 times, at least about 40 times, or at least about 50 times, the TIL cells can be considered to have entered the next stage of in vitro expansion. In one embodiment, each stage can also be divided by the conditions of TIL cell culture. In one embodiment, when T cell activators and/or T cell growth factors are added or supplemented in the cell culture medium, the TIL cells can be considered to have entered the next stage of in vitro expansion. In one embodiment, after the TIL cells have been centrifuged and/or washed, the TIL cells can be considered to have entered the next stage of in vitro expansion. In one embodiment, each stage can also be divided by the number of days of TIL cell culture. In one embodiment, when the TIL cells are cultured in vitro for about 1-100 days, such as about 1 day, about 2 days, about 3 days, about 4 days, about 5 days, about 6 days, about 7 days, about 8 days, about 9 days, about 10 days, about 11 days, about 12 days, about 13 days, about 14 days, about 15 days, about 16 days, about 17 days, about 18 days, about 19 days, about 20 days, about 30 days, about 40 days, about 50 days or about 100 days, it can be considered that TIL cells have entered the next stage of in vitro expansion.

[0139] In the present invention, the term “first-stage in vitro expansion” generally refers to the stage of expansion using T cell growth factors after primary TILs are obtained from tissues. In one embodiment, the tissue of the present invention can be selected from the following group: tumor tissue, tumor-associated lymph nodes with or without tumor metastasis, tumor metastasis, fragments of paracancerous tissue, pleural effusion and/or peritoneal effusion. The pleural effusion of the present invention may be the pleural effusion of patients with metastatic cancer. In one embodiment, the amplification of the present invention can be in vivo amplification performed autologously or allogeneically, or can be in vitro amplification. The first stage of in vitro amplification of the present invention may also be called the preREP (pre-rapid amplification) stage. For example, TILs derived from tumor tissue and not expanded in vitro may be referred to as the first TIL population. For example, the TILs obtained through the first stage of in vitro amplification in the two-step culture method of the present invention can be called the second TIL population.

[0140] In the present invention, the term “second-stage in vitro expansion” generally refers to the stage in which tissue is removed from the subject and expanded, and then expanded again. In one embodiment, compared with the TIL expanded in vitro in the first stage, the number of TIL cells expanded in vitro in the second stage of the present invention is increased, for example, it can be increased by at least about 10 times (or at least about 20, 30, 40, 50, 60, 70, 80 or 90-fold), or in one embodiment the number of cells can be increased at least about 100-fold. In one embodiment, the culture conditions of the second stage of in vitro amplification may be different from those of the first stage of in vitro amplification, for example, the added culture substances may be different. For example, in the two-step culture method of the present invention, the second stage of in vitro amplification may also be called the REP (rapid amplification) stage. For example, the TILs obtained through the second stage of in vitro amplification in the two-step culture method of the present invention can be called the third TIL group.

[0141] In the present invention, the term “in vivo” generally refers to events occurring within the body of a subject.

[0142] In the present invention, the term “in vitro” generally refers to events that occur outside the body of a subject.

[0143] In the present invention, the term “ex vivo” generally refers to events involving treatment or surgery on cells, tissues and/or organs that have been removed from the body of a subject. In one embodiment, the cells, tissues and/or organs can be returned to the subject's body through surgery or treatment.

[0144] In the present invention, the term “secretory capacity” generally refers to the ability of a cell to express a polypeptide or protein and to transfer the polypeptide or protein of the invention to the extracellular environment.

[0145] In the present invention, the term “irradiation” generally refers to the treatment of substances by radiation. For example, in one embodiment, irradiating may refer to irradiating a substance by X-rays, alpha-rays, beta-rays, or gamma-rays.

[0146] In the present invention, the term “engineered cell” generally refers to a cell that has been genetically modified by adding additional genetic material in the form of DNA or RNA to the total genetic material of the cell. In one embodiment, engineered cells can be genetically modified to express T cell activators and/or T cell growth factors of the invention.

[0147] In the present invention, the term “co-culture” generally refers to the cultivation of two or more different populations of cells with some degree of contact between them. The “contact” of two or more different populations of cells in the present invention can, in one embodiment, be through direct contact, that is, the cells of one population are in direct physical contact with the cells of another population. Or in one embodiment indirect contact may be mediated by a shared culture medium. The shared culture medium of the present invention may contain metabolites produced and released by at least one population of co-cultured cells and used to culture another population of cells.

[0148] In the present invention, the term “contacting” generally means that two or more substances of different types are brought into contact together in any order, in any manner and for any length of time. In one embodiment, by direct contact, for example, one or more feeder cells, T cell activators and/or T cell growth factors can be added to the culture medium of the TIL cells, for example, one or more feeder cells, T cell activators and/or T cell growth factors can be added to the culture medium of the TIL cells. The culture medium of TIL cells, T cell activators and/or T cell growth factors is added to and/or replaced with the culture medium of the TIL cells. For example, one or more feeder cells, T cell activators and/or T cell growth factors can be added to the culture medium of the TIL cells. Culture medium containing these factors is used for the culture of TIL cells; in one embodiment, it can be through indirect contact, for example, metabolic products from feeder cells can be produced and released for culturing TIL cells.

[0149] In the present invention, the terms “contact simultaneously”, “contact together”, “contact simultaneously with”, “simultaneously” and “commonly” generally refer to the administration of two or more substances to a subject and/or cells such that the substances are both present in the subject and/or in the environment of the cell culture. Simultaneous exposure may include simultaneous administration in different compositions, administration in different compositions at different times, or administration in a composition in which more than two active pharmaceutical ingredients are present. For example, “contacting at the same time” in the present invention may generally mean contacting at substantially the same time.

[0150] In the present invention, the term “expansion” generally refers to a several-fold increase in the number of cells over a period of time. In one embodiment the number of cells can be increased at least about 3-fold (or 4, 5, 6, 7, 8 or 9-fold), in one embodiment the number of cells can be increased at least about 10-fold (or 20, 30, 40, 50, 60, 70, 80 or 90-fold), or in one embodiment the number of cells can be increased at least about 100-fold. In the present invention, the term “expanded” generally means that the cells of the invention have undergone one or more of the above-mentioned amplifications.

[0151] In the present invention, the term “polymer” generally refers to a molecule consisting of individual chemical moieties linked together. The polymer moieties of the present invention may be the same or different. In one embodiment, the term “polymer” may refer to individual chemical moieties joined end to end to form linear molecules, as well as individual chemical moieties linked together in branched (such as “multi-arm” or “star”) structures. In one embodiment the polymer may include, for example, polysaccharides, dextran, hydrogels, polyethylene glycols, or poloxamer. Poloxamers are nonionic triblock copolymers with a central hydrophobic chain of polyoxypropylene (poly(propylene oxide)) flanked by two hydrophilic chains of polyoxyethylene (poly(ethylene oxide)). The materials encompassed by the present invention may be formulated with, or administered with, any polymer described herein or known in the art.

[0152] In the present invention, the term “chimeric antibody” generally refers to an antibody in which the variable region of a murine antibody is fused with the constant region of a human antibody, which can reduce the immune response induced by the murine antibody. To create chimeric antibodies, hybridomas that secrete mouse-derived specific monoclonal antibodies can be established, and then the variable region genes can be cloned from mouse hybridoma cells. To clone the constant region gene of a human antibody, the mouse variable region gene and the human constant region gene are connected to form a chimeric gene and then inserted into an expression vector. The chimeric antibody molecule can be expressed in a eukaryotic system or a prokaryotic system.

[0153] In the present invention, the term “humanized antibody”, also known as CDR-grafted antibody, usually refers to transplanting the mouse CDR sequence into the human antibody variable region framework, that is, different types of antibodies produced within the framework sequences of human germline antibodies. It can overcome the heterologous reaction induced by chimeric antibodies carrying a large amount of mouse protein components. Such framework sequences can be obtained from public DNA databases or published references that include germline antibody gene sequences. For example, the germline DNA sequences of human heavy and light chain variable region genes are available in the “VBase” human germline sequence database.

[0154] In the present invention, the term “fully human antibody” is also called “fully human monoclonal antibody”, and the variable region and constant region of the antibody are both of human source, eliminating immunogenicity and toxic side effects. The development of monoclonal antibodies has gone through four stages, namely: murine monoclonal antibodies, chimeric monoclonal antibodies, humanized monoclonal antibodies and fully human monoclonal antibodies. The antibody or ligand of the present invention may be a fully human monoclonal antibody. Relevant technologies for the preparation of fully human antibodies can include: human hybridoma technology, EBV-transformed B lymphocyte technology, phage display technology (phage display), transgenic mouse antibody preparation technology (transgenic mouse), and single B cell antibody preparation technology.

[0155] In the present invention, the term “CDR” generally refers to one of the six hypervariable regions within the variable domain of an antibody that primarily contribute to antigen binding. One of the most commonly used definitions of the 6 CDRs can be provided by Kabat E. A. et al., Chothia et al. and MacCallum et al. As used in the present invention, the Kabat definition of CDR can be applied to CDR1, CDR2 and CDR3 of the light chain variable domain (CDR L1, CDR L2, CDR L3 or L1, L2, L3), as well as the heavy chain variable domain CDR1, CDR2 and CDR3 (CDR H1, CDR H2, CDR H3 or H1, H2, H3).

[0156] In the present invention, the term “IL-2” or “IL2” generally refers to a T cell growth factor; it includes all forms of IL-2 and may include in one embodiment human and mammalian forms, conservative amino acid substitutions, glycoform modifications or variants, or active fragments thereof. The GeneID of the gene encoding IL-2 may be 3558.

[0157] In the present invention, the term “antigen-presenting cell” or “APC” generally refers to an immune cell that displays on its surface an exogenous antigen complexed with a major histocompatibility complex (MHC). Systemic cells, for example, include helper cells (e.g., B cells, dendritic cells, etc.). T cells can recognize these complexes using their T cell receptors (TCRs). APCs can process antigens and present them to T cells. In one embodiment, the antigen-presenting cells may include selected from the group consisting of peripheral mononuclear cells, dendritic cells, and artificial antigen-presenting cells.

[0158] In the present invention, the term “TIL characteristics” generally refers to the characteristics of TIL cells obtained by the culture method of the present invention. Changes in TIL characteristics can include: increased TIL cell number, increased proportion of viable cells, increased survival ability, improved proportion of T cell subpopulations, increased cytokine secretion ability, increased tumor cell killing ability in vitro, increased in vivo Tumor killing capacity, increased T cell receptor (TCR) clonal diversity and increased TIL cell numbers in tissues, or any combination thereof. Variations of the present invention may be improvements or decreases.

[0159] In the present invention, the term “persistence” generally refers to the presence of cells in vitro and/or in the body of a subject. For example, an increase in the survival ability of TIL cells may refer to an increase in the time that TIL cells exist in the body. For example, increased viability may refer to an increase in the time a cell exists within a subject's tissue, such as a tumor, spleen, bone marrow, lung tissue, and blood. For example, the increase in survival ability can be an increase in the survival ability of TIL cells after IL-2 is removed from the culture medium.

[0160] In the present invention, the term “artificial antigen-presenting cells” generally refers to artificially constructed immune cells for presenting exogenous antigens. For example, the way of presenting exogenous antigens can be that the surface of the artificial antigen-presenting cells contains exogenous antigens complexed with a major histocompatibility complex (MHC). In one embodiment, isolated artificial antigen presenting cells (aAPC) may be included, which may include expression of HLA-A/B/C (the GeneID of the gene encoding it may be 3105, 3106 or 3107), CD64 (the GeneID of the gene encoding it can be 2209), CD80 (the GeneID of the gene encoding it may be 941), ICOS-L (the GeneID of the gene encoding it may be 23308) and CD58 (the GeneID of the gene encoding it may be 965) cells, and may be modified to express more than one T cell activator.

[0161] As used herein, the term “fusion protein” generally refers to an amino acid sequence containing a first polypeptide or protein, or a fragment, analog or derivative thereof, and a heterologous polypeptide or protein (i.e., different from the first polypeptide or protein or of a second polypeptide or protein or a fragment, analog or derivative thereof, or that is generally not part of the first polypeptide or protein or a fragment, analog or derivative thereof) of the amino acid sequence Peptide or protein. In some cases, a fusion protein may comprise a prophylactic or therapeutic drug fused to a heterologous protein, polypeptide or peptide. Among others, the heterologous proteins, polypeptides or peptides of the invention may or may not be different types of preventive or therapeutic drugs. For example, two different proteins, polypeptides or peptides with immunomodulatory activity can be fused together to form a fusion protein. In some cases, the fusion protein may retain or have increased activity compared to the activity of the original polypeptide or protein prior to fusion of the heterologous protein, polypeptide, or protein.

[0162] In the present invention, the term “killing ability” generally refers to killing target cells by contacting the cells of the present invention with an effective amount of a substance. In one embodiment, the agent of the invention may be a TIL cell. Killing of the present invention may include killing cells by itself or by promoting CDC, apoptosis, ADCC and/or phagocytosis of other cells or substances, or by a combination of two or more of these mechanisms.

[0163] As used herein, the term “administration” or “administering” generally refers to the delivery of a substance to a subject in need thereof by any route known in the art. Pharmaceutical carriers and formulations or compositions are also well known in the art. Routes of administration may include: intravenous, intramuscular, intradermal, subcutaneous, transdermal, mucosal, intratumoral and/or mucosal.

[0164] In the present invention, the term “kit” generally refers to two or more components packaged together in a container, receptacle or other container, one of which corresponds to the substance of the present invention. For example, TIL cells of the invention are included.

[0165] In the present invention, the term “subject” generally refers to a cell or an animal, which may be a mammal, such as a human, a non-human primate (ape, gibbon, gorilla, chimpanzee, orangutan, macaque), a domestic animal (dog and cats), farm animals (poultry such as chickens and ducks, horses, cattle, goats, sheep, pigs) and laboratory animals (mice, rats, rabbits, guinea pigs). Human subjects include fetal, neonatal, infant, adolescent, and adult subjects. Subjects include animal disease models, such as tumor animal models, and other animal models known to those skilled in the art.

[0166] In the present invention, the term “feeder” generally refers to cultured cells that can be used to support the growth of cells for another purpose. For example, this can be achieved by growing in vitro and secreting at least one factor into the culture medium. In one embodiment, feeder cells may include antigen-presenting cells.

[0167] In the present invention, the term “specific binding” generally refers to a binding substance that recognizes a specific target substance but does not substantially recognize or bind to other molecules in the sample. For example, if a binding substance can specifically bind to a specific target substance of the invention from one species, the binding substance of the invention can also specifically bind to a target substance of the invention from one or more other species. or homologous target substances. This interspecies reactivity may not by itself alter the classification of the binding substance as specific. In some cases, a binding substance that specifically binds to a target substance may also bind to a different allelic form of the target substance.

[0168] In the present invention, the term “complete culture process” generally refers to the complete process starting from the isolation of cells from tumor tissue isolated from a patient, through one or more amplifications, and finally obtaining cells that can be administered to a subject.

[0169] In the present invention, the term “cell culture medium” generally refers to the nutrient solution in which cells, such as mammalian cells, are grown. The preparation of cell culture media is well known in the art. Typically, cell culture media includes buffers, salts, carbohydrates, amino acids, vitamins, and necessary trace elements. Cell culture media may or may not contain serum, peptone and/or protein. Cell culture media can be supplemented with additional components or increased concentrations of components such as amino Acids, salts, sugars, vitamins, hormones, growth factors, buffers, antibiotics, lipids, trace elements, etc., depending on the requirements of the cells to be cultured and/or the desired cell culture parameters.

[0170] In the present invention, the term “pharmaceutical composition” or “pharmaceutical preparation” generally refers to a preparation that allows the biological activity of the active ingredient to be effective and that does not contain substances that are harmful to the recipient to whom the preparation is to be administered. Additional ingredients that are unacceptably toxic to testers. Such preparations are sterile. “Pharmaceutically acceptable” excipients (carriers, additives) are those which can be reasonably administered to a subject mammal to provide an effective dose of the active ingredient employed.

[0171] As used herein, the term “tumor-infiltrating lymphocytes” or “TILs” generally refers to a population of cells originally obtained as white blood cells that have left the subject's bloodstream and migrated into the tumor. TILs may include but are not limited to CD8⁺ Cytotoxic T cells (lymphocytes), Th1 and Th17CD4⁺ T cells, natural killer cells, dendritic cells and M1 macrophages. TILs may include primary TILs and secondary TILs. “Primary TILs” can be those TIL cells obtained from a subject's tissue sample, and “secondary TILs” can be any population of TILs that have been expanded or expanded in the present invention. In some embodiments, the tumor-infiltrating lymphocytes of the present invention may not be isolated and purified, or may infiltrate with tumor cells. In one embodiment, the TIL of the present invention may refer to a TIL group.

[0172] In the present invention, the term “central memory T cells” generally refers to T cells with long-term memory and capable of receiving antigen restimulation. Central memory T cells can have CD45RO⁺ CD62L⁺ The phenotype can, for example, be expressed through CD45RO⁺ and CD62L⁺ to identify central memory T cells. Central memory T cells can have stronger anti-tumor growth capabilities than ordinary T cells.

[0173] In the present invention, the term “regulatory T cells” generally refers to a subset of T cells that control autoimmune reactivity in the body. Regulatory T cells can have CD4⁺ CD25⁺ Foxp3⁺ The phenotype can be, for example, via CD4⁺, CD25⁺ and Foxp3⁺ to identify regulatory T cells. Regulatory T cells can have the ability to inhibit the anti-tumor growth of T cells.

[0174] In the present invention, the term “activated T cells” generally refers to T cells that have been activated to have the ability to resist tumor growth. Activated T cells can have PD-1⁺ (PD1⁺), LAG-3⁺ (LAG3⁺) or CD28⁺ The phenotype, for example, can be through PD-1⁺, LAG-3⁺ or CD28⁺ to identify activated T cells. Activated T cells can have the ability to fight tumor growth.

[0175] In the present invention, the term “tumor-specific T cells” generally refers to T cells that can specifically resist tumor growth. Tumor-specific T cells can have CD103⁺ CD39⁺ The phenotype, for example, can be determined by CD103⁺ and CD39⁺ to identify tumor-specific T cells. Tumor-specific T cells can have more specific anti-tumor growth capabilities than ordinary T cells.

[0176] In the present invention, the term “stem cell-like T cells” generally refers to a type of T cells that may have the potential to self-proliferate and/or differentiate. For example, cells with differentiation potential and/or sustained proliferation ability may be considered stem cell-like cells in the present invention. For example, naive T cells (CD45RO⁻ CD62L⁺) can be considered stem cell-like cells. For example, naive T cells can have CD45RO⁻ CD62L⁺ phenotype. For example via CD45RO⁻ CD62L⁺ to identify stem cell-like T cells. For example, it can be through CD39⁻ CD69⁻ to identify stem cell-like T cells. For example, stem cell-like T cells can have TCF1⁺ The phenotype can be, for example, via TCF1⁺ to identify stem cell-like T cells. Stem cell-like T cells can have stronger and/or longer-term anti-tumor growth capabilities than ordinary T cells.

[0177] In the present invention, the term tumor “fragments” generally refers to tumor fragments that can be formed by mechanical fragmentation, enzymatic hydrolysis and/or other fragmentation methods after tumor tissue is removed from the subject's body.

[0178] In the present invention, the term “composition” or “pharmaceutical composition” generally refers to at least one cell and at least one and optionally more than one other pharmaceutically acceptable chemical components such as carriers, stabilizers, diluents, dispersants, suspending agents, thickeners and/or excipients.

[0179] In the present invention, the term “pharmaceutically acceptable carrier” generally refers to one or more non-toxic materials that does not interfere with the active ingredient. For example, a pharmaceutically acceptable carrier may not interfere with the biological activity of the active ingredient; for example, a pharmaceutically acceptable carrier may not interfere with the effectiveness of the biological activity possessed by the active ingredient. Such preparations may conventionally contain salts, buffers, preservatives, compatible carriers, and optionally other therapeutic agents. Such pharmaceutically acceptable preparations may also contain compatible solid or liquid fillers, diluents or encapsulating materials suitable for administration to humans. Other contemplated carriers, excipients, and/or additives that may be used in the formulations described herein may include: for example, flavoring agents, antimicrobial agents, sweeteners, antioxidants, antistatic agents, lipids, Protein excipients (such as serum albumin, gelatin, casein), salt-forming counterions (such as sodium), etc. These and other known pharmaceutical carriers, excipients and/or additives suitable for use in the formulations described herein are known in the art. In the present invention, “pharmaceutically acceptable carrier” can be understood as a vector that does not include nucleic acid forms used in genetic engineering.

[0180] In the present invention, the term “functionally active fragment” generally refers to a fragment that has a partial region of a full-length protein or nucleic acid, but retains or partially retains the biological activity or function of the full-length protein or nucleic acid. For example, a functionally active fragment may retain or partially retain the ability of the full-length protein to bind another molecule.

[0181] In the present invention, the term “T cell activator” generally refers to a substance that binds to the corresponding binding receptor on T cells and mediates T cell costimulatory responses. T cell activators can be substances other than antigen receptors that are required by T cells to mount an effective immune response. T cell activators may refer to T cell costimulatory molecules. For example, the T cell activator of the present invention may comprise a variant, a homolog thereof, or any substance comprising a functionally active fragment thereof. T cell activators may include, but are not limited to, MHC class I molecules, TNF receptor proteins, immunoglobulin-like proteins, cytokine receptors, integrins, signaling lymphocyte activation molecules (SLAM proteins), NK cell activation receptors, BTLA (GeneID of the gene encoding it can be 151888), Toll ligand receptor, OX40 (GeneID of the gene encoding it can be 7293), CD2 (GeneID of the gene encoding it can be 914), CD7 (GeneID of the gene encoding it can be is 924), CD27 (the gene encoding it can have a GeneID of 939), CD28 (the gene encoding it can have a GeneID of 940), CD30 (the gene encoding it can have a GeneID of 943), CD40 (the gene encoding it can have a GeneID of 958), CDS, ICAM-1 (GeneID encoding it can be 3383), LFA-1 (CD11a/CD18) (GeneID encoding it can be 3689), 4-1BB (CD137) (GeneID encoding it The GeneID of the gene can be 3604), B7-H3 (The GeneID of the gene encoding it can be 80381), ICOS (CD278) (The GeneID of the gene encoding it can be 29851), GITR (The GeneID of the gene encoding it can be 8784), BAFFR (GeneID of the gene encoding it can be 115650), LIGHT (GeneID of the gene encoding it can be 8740), HVEM (LIGHTR) (GeneID of the gene encoding it can be 8764), KIRDS2 (GeneID of the gene encoding it can be 100132285), SLAMF7 (the gene encoding it can have a GeneID of 57823), NKp80 (KLRF1) (the gene encoding it can have a GeneID of 51348), NKp44 (the gene encoding it can have a GeneID of 9436), NKp30 (the gene encoding it can have a GeneID of 259197), NKp46 (GeneID of the gene encoding it can be 9437), CD19 (GeneID of the gene encoding it can be 930), CD4 (GeneID of the gene encoding it can be 920), CD8a (GeneID of the gene encoding it can be 925), CD8β (GeneID of the gene encoding it can be 926), IL-2Rβ, IL-2Rγ, IL7Rα (GeneID of the gene encoding it can be 3575), ITGA4 (GeneID of the gene encoding it can be 3676), VLA1 (GeneID of the gene encoding it It can be 3672), CD49a (the gene GeneID encoding it can be 3672), IA4 (the gene encoding it GeneID can be 3732), CD49D (the gene encoding it GeneID can be 3676), ITGA6 (the gene encoding it GeneID can be 3655), VLA-6 (the gene GeneID encoding it can be 3655), CD49f (the gene encoding it GeneID can be 3655), ITGAD (the gene encoding it GeneID can be 3681), CD11d (the gene encoding it GeneID can be 3681), ITGAE (the gene encoding it can have a GeneID of 3682), CD103 (the gene encoding it can have a GeneID of 3682), ITGAL (the gene encoding it can have a GeneID of 3683), CD11a (the gene encoding it can have a GeneID of 3683), LFA-1 (GeneID of the gene encoding it can be 3683), ITGAM (GeneID of the gene encoding it can be 3684), CD11b (GeneID of the gene encoding it can be 3684), ITGAX (GeneID of the gene encoding it can be 3687), CD11c (GeneID of the gene encoding it can be 3687), ITGB1 (GeneID of the gene encoding it can be 3688), CD29 (GeneID of the gene encoding it can be 3688), ITGB2 (GeneID of the gene encoding it can be 3689), CD18 (GeneID of the gene encoding it can be 3689), LFA-1 (GeneID of the gene encoding it can be 3689), ITGB7 (the gene GeneID encoding it can be 3695), NKG2D (the gene encoding it GeneID can be 22914), NKG2C (the gene encoding it GeneID can be 3822), TNFR2 (the gene encoding it GeneID can be 7133), TRANCE/RANKL (the gene GeneID encoding it can be 8600), DNAM1 (CD226) (the gene encoding it GeneID can be 10666), SLAMF4 (CD244, 2B4) (the gene encoding it GeneID can be 51744), CD84 (GeneID of the gene encoding it can be 8832), CD96 (Tactile) (GeneID of the gene encoding it can be 10225), CEACAM1 (GeneID of the gene encoding it can be 634), CRTAM (GeneID of the gene encoding it can be 56253), Ly9 (CD229) (GeneID of the gene encoding it can be 4063), CD160 (BY55) (GeneID of the gene encoding it can be 11126), PSGLI (GeneID of the gene encoding it can be 6404), CD100 (SEMA4D) (GeneID of the gene encoding it can be 6404), CD100 (SEMA4D) (GeneID of the gene encoding it can be 11126) The gene GeneID can be 10507), CD69 (the gene encoding it can have a GeneID of 969), SLAMF6 (NTB-A, Ly108) (the gene encoding it can have a GeneID of 114836), SLAM (SLAMF1, CD150, IPO-3) (encoding Its gene GeneID can be 6504), BLAME (SLAMF8) (the gene encoding it can have a GeneID of 56833), SELPLG (CD162) (the gene encoding it can have a GeneID of 6404), LTBR (the gene encoding it can have a GeneID of 4055), LAT (the gene GeneID encoding it can be 27040), GADS (the gene encoding it GeneID can be 9402), SLP-76 (the gene encoding it GeneID can be 3937), PAG/Cbp (the gene encoding it GeneID can be 55824), CD19a, a ligand that specifically binds CD3, a ligand that specifically binds CD28, a ligand that specifically binds HVEM, a ligand that specifically binds CD40L, a ligand that specifically binds OX40, and a ligand that specifically binds 4-Ligand for 1BB. A costimulatory intracellular signaling domain may refer to the intracellular portion of a T cell activator. The intracellular signaling domain may comprise the entire intracellular portion of the molecule derived therefrom or the entire native intracellular signaling domain or a functional fragment thereof.

[0182] In the present invention, the term “T cell growth factor” generally refers to a biologically active polypeptide or small molecule compound that causes cell proliferation. For example, the T cell growth factors of the present invention may comprise variants, homologs or anything comprising functionally active fragments thereof. In one embodiment, the T cell growth factor may be selected from one or more of the following group: IL-2 (GeneID encoding it can be 3558), IL-4 (GeneID the gene encoding it can be 3565), IL-6 (GeneID encoding it can be 3569), IL-7 (GeneID encoding it can be 3574), IL-10 (GeneID encoding it can be 3586), IL-12 (GeneID encoding it can be 3592 or 3593), IL-15 (GeneID encoding it can be 3600), IL-21 (GeneID encoding it can be 59067), TNF-α (GeneID encoding it can be 100137091), gamma interferon (GeneID encoding it can be 3458), GZMB (GeneID encoding it can be 3002), CD107a (GeneID encoding it can be 6499) and so on.

[0183] In the present invention, the term “substantially simultaneously” generally means that TIL can be contacted with two or more substances simultaneously during a period of time during the contact process, but it is not limited to that TIL is always contacted with two or more substances simultaneously during the entire contact process. touch. In one embodiment, substantially simultaneously can mean that the TIL can be with at least 10-95%, such as at least 10%, 20%, 30%, 40%, 50%, 60%, 70%, 75% over a period of time, 80%, 85%, 90%, 95% of each substance of two or more substances are in contact at the same time.

[0184] In the present invention, the term “dendritic cells” generally refers to antigen-presenting cells present in vivo, in vitro, ex vivo or within a host or subject or which may be derived from hematopoietic stem cells or monocytes. Dendritic cells and their precursors can be isolated from various lymphoid organs such as spleen, lymph nodes, as well as bone marrow and peripheral blood. Dendritic cells of the present invention may have characteristic morphology, such as lamellae (lamellipodia) extending in multiple directions of the dendritic cell body. Typically, dendritic cells can express high levels of MHC and costimulatory (eg, B7-1 and B7-2) molecules. Dendritic cells can induce antigen-specific differentiation of T cells in vitro and can elicit primary T cell responses in vitro and in vivo.

[0185] In the present invention, the term “in vitro expansion” generally refers to being cultured to produce changes in the number of cells. The expanded cells can also produce changes in the number and/or proportion of cells, changes in secretion capacity, changes in killing capacity or expression. changes in abilities, or any combination thereof. Variations of the present invention may be improvements or decreases. In the present invention, in vitro amplification can be for the purpose of amplification; to detect the function of TIL cells, for example, to detect the release of cytokines by TIL cells. However, the steps performed on TIL cells (for example, adding more than one substance to the culture medium of TIL cells to detect the ability of TIL cells to release cytokines) may not belong to the in vitro expansion of the present invention.

[0186] In the present invention, the term “peripheral mononuclear cells” or “peripheral blood mononuclear cells” generally refers to cells with a single nucleus in peripheral blood. For example, in the present invention, the peripheral blood mononuclear cells of the present invention may include lymphocytes, monocytes and/or dendritic cells.

[0187] In the present invention, the term “cytokine” generally refers to a protein released by one cell population that acts as an intercellular regulator on another cell. Cytokines of the present invention may be lymphokines, monokines and polypeptide hormones. Cytokines of the present invention may include interleukins (ILs) such as IL-1, IL-1α, IL-2, IL-3, IL-4, IL-5, IL-6, IL-7, IL-8, IL-9, IL-10, IL-11, IL-15, IL-21 and/or IL-12. In the present invention, the term cytokine may include proteins from natural sources or from recombinant cell culture, biologically active equivalents of native sequence cytokines, and functionally active fragments thereof.

[0188] In the present invention, the term “diameter” generally refers to the diameter of a cross-section of the substance of the invention. For example, when the substance of the invention is not spherical, the term “diameter” generally refers to the maximum diameter and/or the mean diameter of the largest cross-section of the substance of the invention. The method for determining the diameter of a substance may be a method commonly used in the art, such as transmission electron microscopy.

[0189] In the present invention, the term “tumor” generally refers to any new pathological tissue proliferation. The tumors of the present invention may be benign or malignant. The tumors of the present invention may be solid or hematological. The term “tumor” may be selected from one or more of the following group: melanoma, ovarian cancer, cervical cancer, lung cancer, bladder cancer, breast cancer, head and neck cancer, pancreatic cancer, liver cancer, gastric cancer, colorectal cancer, and renal cancer.

[0190] In the present invention, the term “tumor tissue” generally refers to a sample from a tumor in a subject, including any solid tumor and/or any tissue that is not a solid tumor in the subject.

[0191] In the present invention, the term “T cell subset proportion” generally refers to the proportion of different T cell subsets in TIL cells or TIL populations. For example, different T cell subsets of the present invention have different immune activities and/or differentiation abilities. For example, T cell subsets of the invention can be distinguished based on T cell surface markers. For example, central memory T cells can have CD45RO⁺ CD62L⁺ phenotype. For example, naive T cells can have CD45RO⁻ CD62L⁺ phenotype. For example, regulatory T cells can have CD4⁺ CD25⁺ Foxp3⁺ phenotype. For example, activated T cells can have CD25⁺, CD28⁺, PD-1⁺ or 41BB⁺ phenotype. For example, tumor-specific T cells can have CD103⁺ CD39⁺ phenotype. For example, stem cell-like T cells can have TCF1⁺ phenotype.

[0192] In the present invention, the term “TIL cell number” generally refers to the number of cells in the TIL cells of the invention. In the present invention, the number of TIL cells may refer to the number of cells in the TIL population obtained at any stage of the present invention. For example, the number of TIL cells may refer to the number of cells of the first TIL population derived from tumor tissue and not expanded in vitro. For example, the number of TIL cells may refer to the number of cells of the second TIL population expanded in vitro in the first stage. For example, the number of TIL cells may refer to the number of cells of the third TIL population expanded in vitro in the second stage. For example, the number of TIL cells may refer to the TIL cells finally obtained by any culture method of the present invention. In the present invention, the number of TIL cells can be measured by methods commonly used in the art, which may include, but are not limited to, manual cell counting with a cell counting plate and/or counting with an automatic cell counter.

[0193] As used herein, the terms “about” and “approximately” generally refer to a statistically significant numerical range. Such a range may be within an order of magnitude of a given value or range and may be included within 50%, preferably within 20%, more preferably within 10%, and most preferably within 5%. Allowable variations encompassed by the terms “about” or “approximately” may depend on the particular system being studied, and will be readily understood by those of ordinary skill in the art.

[0194] In the present invention, the terms “above”, “below”, “at most” and “at least” include the present number.

### DETAILED DESCRIPTION

### TNFAIP3 Knockout

[0195] The present invention provides methods for reducing the expression and/or reducing the activity of peptidase C64 family members and/or functionally active fragments thereof in said cells.

[0196] In one aspect, the present invention provides a method for culturing cells so that the expression and/or activity of peptidase C64 family members and/or functionally active fragments thereof is reduced in the cells. For example, the peptidase C64 family member may comprise a ubiquitin binding domain. For example, the peptidase C64 family member may comprise TNFAIP3.

[0197] For example, the target gene of the present invention may be a gene encoding a member of the peptidase C64 family and/or a functionally active fragment thereof. For example, cells obtained by reducing the expression and/or attenuating the activity of at least one target gene may exhibit improved cell properties compared to cells in which the expression and/or activity of the target gene is unchanged. In one embodiment, the cells whose expression and/or activity of the target gene are unchanged may refer to cells derived from the same donor and which have not had the expression and/or activity of at least one target gene of the cells reduced. In one embodiment, cells whose expression and/or activity of the target gene are unchanged may refer to cells derived from the same donor and in which other genes other than the target gene of the cells have not been altered (e.g., knocking out the other genes, Cells with reduced expression and/or weakened activity (basically no impact on cell function).

[0198] For example, the cells include immune cells. For example, the cells comprise immune effector cells. For example, the cells include immune effector T cells, immune effector NK cells, and immune effector NKT cells. For example, the cells include phagocytes, lymphocytes, neutrophils, eosinophils and/or basophils.

[0199] For example, the cells include monocytes, macrophages, and/or dendritic cells.

[0200] For example, the cells of the present invention also include cells derived from differentiation of stem cells. For example, the cells of the present invention also include cells derived from differentiation of pluripotent stem cells. For example, the stem cells of the present invention can be obtained by induction. For example, the above-mentioned stem cells of the present invention may include induced pluripotent stem cells (iPSC), embryonic stem cells, bone marrow stem cells, umbilical cord blood stem cells and/or peripheral blood stem cells.

[0201] For example, “stem cells” of the present invention also include pluripotent cells, multipotent cells, precursor cells and progenitor cells. For example, stem cells can be obtained from hematopoietic or mesenchymal stem cells obtained from bone marrow tissue, placental stem cells obtained from placental tissue, embryonic stem cells obtained from embryonic tissue, or embryonic germ cells obtained from the reproductive tissue of the fetus. Exemplary pluripotent stem cells can also be generated from somatic cells by reprogramming them to a pluripotent state through the expression of certain transcription factors associated with pluripotency; these cells are called “induced pluripotent stem cells” or “iPSCs”.

[0202] For example, the cells include B cells, T cells, natural killer cells and/or natural killer-like T cells (NKT). For example, “unmodified cells” or “unmodified cells” may refer to cells in which the genome has not been modified and does not contain a gene regulatory system or contains a control gene regulatory system (e.g., empty vector control, non-targeting gRNA, interfering siRNA, etc.) cells or cell populations. For example, the cells comprise αβ T cells and/or γδ T cells. For example, the cells include tumor-infiltrating lymphocytes (TILs). For example, the TIL is a TIL derived from tumor tissue, tumor-associated lymph nodes with or without tumor metastasis, tumor metastasis, fragments of paracancerous tissue, pleural effusion and/or peritoneal effusion and/or derived from frozen Save the TIL after recovery.

[0203] For example, the TILs of the present invention may be TILs and/or sources derived from tumor tissue, tumor-associated lymph nodes with or without tumor metastasis, tumor metastasis foci, fragments of paracancerous tissue, pleural effusion and/or peritoneal effusion. TILs recovered after cryopreservation. For example, TILs of the present invention can be obtained by processing tumor tissue into tumor fragments. For example, the tumor fragments of the present invention have a volume of about 1-27 cubic millimeters. For example, the volume of the tumor fragments of the present invention is about 1 cubic millimeter, about 2 cubic millimeters, about 3 cubic millimeters, about 4 cubic millimeters, about 5 cubic millimeters, about 6 cubic millimeters, about 7 cubic millimeters, about 8 cubic millimeters, about 9 cubic millimeters, about 10 cubic millimeters, about 11 cubic millimeters, about 12 cubic millimeters, about 13 cubic millimeters, about 14 cubic millimeters, about 15 cubic millimeters, about 16 cubic millimeters, about 17 cubic millimeters, about 18 cubic millimeters, about 19 cubic millimeters, about 20 cubic millimeters, about 21 cubic millimeters, about 23 cubic millimeters, about 24 cubic millimeters, about 25 cubic millimeters, about 26 cubic millimeters, or about 27 cubic millimeters.

[0204] For example, the cells comprise engineered immune receptors displayed on the cell surface. For example, the engineered immune receptor specifically binds to an antigen expressed on a target cell. For example, the cells comprise chimeric antigen receptors and/or T cell receptors.

[0205] In one aspect, the present invention provides a method for culturing tumor-infiltrating lymphocytes (TIL), which may include reducing the expression and/or activity of peptidase C64 family members and/or functionally active fragments thereof in the TIL.

[0206] For example, TILs derived from tumor tissue, pleural effusion and/or peritoneal effusion without in vitro amplification can be subjected to at least one stage of in vitro amplification, wherein in during at least one stage of in vitro amplification, the expression and/or activity of peptidase C64 family members and/or functionally active fragments thereof in the TIL is reduced.

[0207] For example, the TILs of the present invention derived from tumor tissue, pleural effusion and/or peritoneal effusion without in vitro amplification can be subjected to the first stage of in vitro amplification and the second stage of in vitro amplification, and in the second stage of the in vitro amplification, the expression and/or activity of peptidase C64 family members and/or functionally active fragments thereof in the TIL can be reduced.

[0208] For example, the TILs of the present invention derived from tumor tissue, pleural effusion and/or peritoneal effusion without in vitro amplification can be subjected to the first stage of in vitro amplification and the second stage of in vitro amplification, and in the first stage of the in vitro amplification, the expression and/or activity of peptidase C64 family members and/or functionally active fragments thereof in the TIL can be reduced.

[0209] For example, the TILs of the present invention derived from tumor tissue, pleural effusion and/or peritoneal effusion without in vitro amplification can be subjected to the first stage of in vitro amplification and the second stage of in vitro amplification, and in the first stage of the in vitro amplification, the expression and/or activity of the peptidase C64 family members and/or functionally active fragments thereof in the TIL can be reduced, and in the second stage of the in vitro amplification, the expression and/or activity of peptidase C64 family members and/or functionally active fragments thereof in the TIL can be reduced

[0210] For example, the TILs of the present invention derived from tumor tissue, pleural effusion and/or peritoneal effusion without in vitro amplification can be subjected to a first-stage in vitro amplification, a second-stage in vitro amplification and a third-stage in vitro amplification, and in the first stage of in vitro amplification of the present invention, the expression and/or activity of peptidase C64 family members and/or functionally active fragments thereof in the TIL can be reduced.

[0211] For example, the TILs of the present invention derived from tumor tissue, pleural effusion and/or peritoneal effusion without in vitro amplification can be subjected to a first-stage in vitro amplification, a second-stage in vitro amplification and a third-stage in vitro amplification, and in the second stage of in vitro amplification of the present invention, the expression and/or activity of peptidase C64 family members and/or functionally active fragments thereof in the TIL can be reduced.

[0212] For example, the TILs of the present invention derived from tumor tissue, pleural effusion and/or peritoneal effusion without in vitro amplification can be subjected to a first-stage in vitro amplification, a second-stage in vitro amplification and a third-stage in vitro amplification, and in the third stage of in vitro amplification of the present invention, the expression and/or activity of peptidase C64 family members and/or functionally active fragments thereof in the TIL can be reduced.

[0213] For example, the TILs of the present invention derived from tumor tissue, pleural effusion and/or peritoneal effusion without in vitro amplification can be subjected to a first-stage in vitro amplification, a second-stage in vitro amplification and a third-stage in vitro amplification, and in the first stage of in vitro expansion of the present invention, the expression and/or activity of peptidase C64 family members and/or functionally active fragments thereof in the TIL can be reduced, and in the second stage of in vitro expansion of the present invention, the expression and/or activity of peptidase C64 family members and/or functionally active fragments thereof in the TIL can be reduced.

[0214] For example, the TILs of the present invention derived from tumor tissue, pleural effusion and/or peritoneal effusion without in vitro amplification can be subjected to a first-stage in vitro amplification, a second-stage in vitro amplification and a third-stage in vitro amplification, and in the first stage of in vitro expansion of the present invention, the expression and/or activity of peptidase C64 family members and/or functionally active fragments thereof in the TIL can be reduced, and in the third stage of in vitro expansion of the present invention, the expression and/or activity of peptidase C64 family members and/or functionally active fragments thereof in the TIL can be reduced.

[0215] For example, the TILs of the present invention derived from tumor tissue, pleural effusion and/or peritoneal effusion without in vitro amplification can be subjected to a first-stage in vitro amplification, a second-stage in vitro amplification and a third-stage in vitro amplification, and in the second stage of in vitro expansion of the present invention, the expression and/or activity of peptidase C64 family members and/or functionally active fragments thereof in the TIL can be reduced, and in the third stage of in vitro expansion of the present invention, the expression and/or activity of peptidase C64 family members and/or functionally active fragments thereof in the TIL can be reduced.

[0216] For example, the TILs of the present invention derived from tumor tissue, pleural effusion and/or peritoneal effusion without in vitro amplification can be subjected to a first-stage in vitro amplification, a second-stage in vitro amplification and a third-stage in vitro amplification, and in the first stage of in vitro expansion of the present invention, the expression and/or activity of peptidase C64 family members and/or functionally active fragments thereof in the TIL can be reduced, in the second stage of in vitro expansion of the present invention, the expression and/or activity of peptidase C64 family members and/or functionally active fragments thereof in the TIL can be reduced, and in the third stage of in vitro amplification of the present invention, the expression and/or activity of peptidase C64 family members and/or functionally active fragments thereof in the TIL can be reduced.

[0217] For example, cells obtained by reducing the expression and/or the activity of the peptidase C64 family member exhibit improved cellular properties compared to cells in which the expression and/or activity of the peptidase C64 family member is unchanged.

[0218] For example, improved cell numbers of the present invention refer to cells in which the expression and/or activity of the peptidase C64 family member is reduced in at least one in vitro expansion stage compared to cells in which the expression and/or activity of the peptidase C64 family member is unchanged/or the cell number of the cells of the present invention with weakened activity can be increased by at least about 1 time, at least about 2 times, at least about 3 times, at least about 4 times, at least about 5 times, at least about 6 times, at least about 7 times, at least about 8 times, at least about 9 times, at least about 10 times, at least about 11 times, at least about 12 times, at least about 13 times, at least about 14 times, at least about 15 times, at least about 20 times, at least about 30 times, at least about 40 times, or at least about 50 times.

[0219] For example, an increased proportion of viable cells can manifest itself as an increase in cell viability. For example, the increased proportion of viable cells of the present invention may refer to increasing the expression of the peptidase C64 family member in at least one in vitro expansion stage compared to cells in which the expression and/or activity of the peptidase C64 family member is unchanged. The proportion of viable cells of the cells of the invention that is reduced and/or has reduced activity can be increased by at least about 100%, at least about 90%, at least about 80%, at least about 70%, at least about 60%, at least about 50%, at least about 40%, at least about 30%, at least about 20%, at least about 19%, at least about 18%, at least about 17%, at least about 16%, at least about 15%, at least about 14%, at least about 13%, at least about 12%, at least about 11%, at least about 10%, at least about 9%, at least about 8%, at least about 7%, at least about 6%, at least about 5%, at least about 4%, at least about 3%, at least about 2%, at least about 1%, at least about 0.5%, at least about 0.4%, at least about 0.3%, at least about 0.2%, or at least about 0.1%.

[0220] For example, the increased cytokine secretion ability of the present invention may refer to an increase in the cytokine secretion ability of a cell selected from the group consisting of: IL-2, IL-6, CD107a, GZMB, TNF-α, and IFN-γ. For example, the improved cytokine secretion capacity of the present invention may refer to increasing the expression and/or activity of the peptidase C64 family member in at least one in vitro expansion stage compared to cells in which the expression and/or activity of the peptidase C64 family member is unchanged. The proportion of cells secreting cytokines in the cells of the present invention with reduced expression and/or weakened activity can be increased by at least about 1 time, at least about 2 times, at least about 3 times, at least about 4 times, at least about 5 times, at least about 6 times, At least about 7 times, at least about 8 times, at least about 9 times, at least about 10 times, at least about 11 times, at least about 12 times, at least about 13 times, at least about 14 times, at least about 15 times, at least about 20 times, At least about 30 times, at least about 40 times, or at least about 50 times. For example, the improved cytokine secretion capacity of the present invention may refer to increasing the expression and/or activity of the peptidase C64 family member in at least one in vitro expansion stage compared to cells in which the expression and/or activity of the peptidase C64 family member is unchanged. The proportion of cells secreting cytokines in the cells of the present invention with reduced expression and/or weakened activity can be increased by at least about 100%, at least about 90%, at least about 80%, at least about 70%, at least about 60%, at least about 50%, At least about 40%, at least about 30%, at least about 20%, at least about 19%, at least about 18%, at least about 17%, at least about 16%, at least about 15%, at least about 14%, at least about 13%, At least about 12%, at least about 11%, at least about 10%, at least about 9%, at least about 8%, at least about 7%, at least about 6%, at least about 5%, at least about 4%, at least about 3%, at least about 2%, at least about 1%, at least about 0.5%, at least about 0.4%, at least about 0.3%, at least about 0.2%, or at least about 0.1%.

[0221] For example, the improved tumor cell killing ability of the present invention may refer to increasing the expression and/or activity of the peptidase C64 family member in at least one in vitro expansion stage compared with cells in which the expression and/or activity of the peptidase C64 family member is unchanged. The tumor cell killing rate of the cells of the present invention with reduced expression and/or weakened activity can be increased by at least about 1 times, at least about 2 times, at least about 3 times, at least about 4 times, at least about 5 times, at least about 6 times, at least about 7 times, at least about 8 times, at least about 9 times, at least about 10 times, at least about 11 times, at least about 12 times, at least about 13 times, at least about 14 times, at least about 15 times, at least about 20 times, at least about 30 times, at least about 40 times, or at least about 50 times. For example, the improved tumor cell killing ability of the present invention may refer to increasing the expression and/or activity of the peptidase C64 family member in at least one in vitro expansion stage compared with cells in which the expression and/or activity of the peptidase C64 family member is unchanged. The tumor cell killing rate of the cells of the present invention with reduced expression and/or weakened activity can be increased by at least about 100%, at least about 90%, at least about 80%, at least about 70%, at least about 60%, at least about 50%, at least about 40%, at least about 30%, at least about 20%, at least about 19%, at least about 18%, at least about 17%, at least about 16%, at least about 15%, at least about 14%, at least about 13%, at least about 12%, at least about 11%, at least about 10%, at least about 9%, at least about 8%, at least about 7%, at least about 6%, at least about 5%, at least about 4%, at least about 3%, at least about 2%, at least about 1%, at least about 0.5%, at least about 0.4%, at least about 0.3%, at least about 0.2%, or at least about 0.1%. For example, the tumor cell killing rate of the cells of the present invention can be measured by the IncuCyte system or CFSE and DAPI staining methods. For example, tumor cell killing of cells of the present invention may refer to the ability of the cells to kill solid tumor cells.

[0222] For example, the improved cell subpopulation ratio of the present invention may comprise one or more selected from the following group: increased CD8⁺ Cell proportion, increased central memory cell and/or naive cell proportion, decreased regulatory cell proportion, increased activated cell proportion, increased tumor-specific cell proportion, and stem cell-like cell proportion increased.

[0223] For example, in CD8⁺ cells, central memory cells and/or immature cells, activated cells, tumor-specific cells and/or stem cell-like cells can be increased by at least about 100%, at least about 90%, at least about 80%, at least about 70%, at least about 60%, at least about 50%, at least about 40%, At least about 30%, at least about 20%, at least about 19%, at least about 18%, at least about 17%, at least about 16%, at least about 15%, at least about 14%, at least about 13%, at least about 12%, At least about 11%, at least about 10%, at least about 9%, at least about 8%, at least about 7%, at least about 6%, at least about 5%, at least about 4%, at least about 3%, at least about 2%, At least about 1%, at least about 0.5%, at least about 0.4%, at least about 0.3%, at least about 0.2%, or at least about 0.1%.

[0224] For example, the reduced proportion of exhausted cells of the present invention can be increase of PD-1⁺, LAG-3⁺, TIM-3⁺, and/or CD39⁺ cell proportion. For example, the reduced proportion of regulatory cells of the present invention can be reduction of CD4⁺ CD25⁺ Foxp3⁺ cell proportion. For example, the reduced proportion of apoptotic cells of the present invention can be reduction of CD95⁺ caspass3⁺ and/or CD95⁺ DR5⁺ cell proportion.

[0225] For example, the proportion of exhausted cells, regulatory cells and/or apoptotic cells in the cells can be reduced by at least about 100%, at least about 90%, at least about 80%, at least about 70%, at least about 60%, at least about 50%, At least about 40%, at least about 30%, at least about 20%, at least about 19%, at least about 18%, at least about 17%, at least about 16%, at least about 15%, at least about 14%, at least about 13%, At least about 12%, at least about 11%, at least about 10%, at least about 9%, at least about 8%, at least about 7%, at least about 6%, at least about 5%, at least about 4%, at least about 3%, At least about 2%, at least about 1%, at least about 0.5%, at least about 0.4%, at least about 0.3%, at least about 0.2%, or at least about 0.1%, or can be reduced by at least about 1 times, at least about 2 times, at least About 3 times, at least about 4 times, at least about 5 times, at least about 6 times, at least about 7 times, at least about 8 times, at least about 9 times, at least about 10 times, at least about 11 times, at least about 12 times, at least About 13 times, at least about 14 times, at least about 15 times, at least about 20 times, at least about 30 times, at least about 40 times, or at least about 50 times.

[0226] For example, the culture method of the present invention may include a gene editing step for cells. For example, it includes: subjecting said cells to at least one stage of in vitro expansion, wherein in at least one stage of the in vitro amplification, a gene regulatory system can be introduced into the cells.

[0227] For example, the gene regulatory system can destroy the target gene at the DNA level. For example, the gene regulatory system can disrupt a region of the target gene or a fragment thereof in the genome of the cell. For example, after using the gene regulation system, the DNA region or fragment thereof where the target gene is located in the cell is sheared, and the expression ability of the target gene is reduced or the activity of the target gene is inhibited. For example, the editing effect of the gene regulation system on the target gene can be long-term and sustained. The genomic region of the present invention is determined based on the hg38 version of the human reference genome.

[0228] For example, the gene regulatory system may include guide nucleic acid molecules and enzymatic proteins. For example, the enzyme protein can have nucleic acid shearing enzyme activity, and the guide nucleic acid molecule can guide the enzyme protein to specifically cut the region where the target gene is located or its fragments. For example, the guide nucleic acid molecule and the enzyme protein may exist in the form of a ribonucleoprotein complex (RNP), or each may exist independently. For example, the enzyme protein may comprise Cas protein. For example, polynucleotides encoding gRNA and Cas protein can be introduced into the target cell, or each independently.

[0229] For example, reducing the expression and/or weakening the activity of at least one target gene of a cell according to the present invention may include: introducing a ribonucleoprotein complex (RNP) containing the guide nucleic acid molecule and the enzyme protein into the cell. For example, the enzyme protein may comprise Cas protein, Cas protein homologues, or functionally active fragments thereof. For example, the guide nucleic acid molecule may comprise guide RNA (gRNA). For example, the guide nucleic acid molecule may comprise guide RNA (gRNA). For example, a complex comprising a polynucleotide encoding a gRNA and a Cas protein can be introduced into the cell. For example, a complex containing gRNA and Cas protein can be introduced into the cell.

[0230] For example, the gRNA can be used to bind to the sequence of the target gene. For example, the binding of the gRNA to the sequence of the target gene can be completely complementary, partially complementary, or can hybridize to the sequence of the target gene under moderately stringent or stringent conditions. For example, the binding of the gRNA to the sequence of the target gene can cause the CRISPR system gRNA to specifically cuts the target gene.

[0231] For example, the editing target region of the present invention may be a region before the promoter. For example, the editing target region of the present invention may be a region with high transcription factor binding capacity. For example, the editing target region of the present invention may be a region with a specific number of transcription factor binding numbers. For example, the editing target region of the present invention can be a continuous region with a binding number of about 3 or more transcription factors.

[0232] For example, when the gene editing system includes CRISPR/Cas9, there may be a protospacer adjacent motif (PAM) downstream of the region targeted by the guiding nucleic acid molecule of the present invention, and the protospacer adjacent motif (PAM) may be AGG, TGG, GGG or CGG. For example, when the PAM region of the target gene is determined, those skilled in the art can easily determine about 15 to about 25 (for example, about 15, about 16, about 17, about 18, about 19, about 20) upstream of the 5′ end of the PAM of the target gene, about 21, about 22, about 23, about 24, about 25) nucleotides, and a suitable gRNA can be designed for the target sequence. For example, the guide nucleic acid molecule is capable of binding to a sequence consisting of about 15 to about 25 nucleotides upstream of the 5′ end of a protospacer adjacent motif (PAM) selected from the group consisting of: AGG, TGG, GGG, and CGG.

[0233] For example, when the gene editing system includes CRISPR/Cas12, there may be a protospacer adjacent motif (PAM) upstream of the region targeted by the guiding nucleic acid molecule of the present invention, and the protospacer adjacent motif (PAM) may be NTTN, TTYN, VTTV, TRTV, TTTV, TATV, TYCV, TNN, or NTN, where Nis A, T, C, or G, Y is T or C, Vis A, C, or G, and R is A or G. For example, when the PAM region of the target gene is determined, those skilled in the art can easily determine about 15 to about 25 (for example, about 15, about 16, about 17, about 18, about 19, about 20) downstream of the 3′ end of the PAM of the target gene, about 21, about 22, about 23, about 24, about 25) nucleotides, and a suitable gRNA can be designed for the target sequence. For example, the guide nucleic acid molecule can bind to a sequence consisting of about 15 to about 25 nucleotides downstream of the 3′ end of the protospacer adjacent motif (PAM) selected from the group consisting of: NTTN, TTYN, VTTV, TRTV, TTTV, TATV, TYCV, TNN, or NTN, where N is A, T, C, or G, Y is T or C, Vis A, C, or G, and R is A or G.

[0234] For example, when the gene editing system of the present invention includes wild-type Cas12a (also known as Cpf1, such as AsCas12a, FnCas12a, LbCas12a, BbCas12a, CMaCas12a and OsCas12a), the upstream region of the guiding nucleic acid molecule targeting of the present invention can be selected from the following PAM sequence: NTTN, where N can be A, T, C or G. For example, when the PAM region of the target gene is determined, those skilled in the art can easily determine about 17 to about 25 (for example, about 17, about 18, about 19, about 20, about 21, about 22) downstream of the 3′ end of the PAM of the target gene, about 23, about 24, or about 25) nucleotides, and a suitable gRNA can be designed for the target sequence.

[0235] For example, when the gene editing system of the present invention includes mutant Cas12a, such as enAsCas12a (mutation sites E174R, S542R and K548R), the upstream of the region targeted by the guiding nucleic acid molecule of the present invention can have a PAM sequence selected from the following: TTYN (TTTN/TTCN), VTTV (ATTV/CTTV/GTTV), or TRTV (TATV/TGTV), where N can be A, T, C or G, Y can be T or C, V can be A, C or G, R Can be A or G. For example, when the PAM region of the target gene is determined, those skilled in the art can easily determine about 17 to about 25 (for example, about 17, about 18, about 19, about 20, about 21, about 22) downstream of the 3′ end of the PAM of the target gene, about 23, about 24, or about 25) nucleotides, and a suitable gRNA can be designed for the target sequence.

[0236] For example, when the gene editing system of the present invention includes mutant Cas12a, such as opAsCas12a (mutation sites: E174R and S542R), the upstream of the region targeted by the guiding nucleic acid molecule of the present invention can have a PAM sequence selected from the following: TTTV (TTTA, TTTC, or TTTG), where V can be A, C, or G. For example, when the PAM region of the target gene is determined, those skilled in the art can easily determine about 17 to about 25 (for example, about 17, about 18, about 19, about 20, about 21, about 22) downstream of the 3′ end of the PAM of the target gene, about 23, about 24, or about 25) nucleotides, and a suitable gRNA can be designed for the target sequence.

[0237] For example, when the gene editing system of the present invention includes mutant Cas12a, such as AsCas12a Ultra (mutation sites: M537R and F870L), the upstream of the region targeted by the guiding nucleic acid molecule of the present invention can have a PAM sequence selected from the following: TTTV, TATV, or TYCV, where V can be A, C or G and Y can be T or C. For example, when the PAM region of the target gene is determined, those skilled in the art can easily determine about 17 to about 25 (for example, about 17, about 18, about 19, about 20, about 21, about 22) downstream of the 3′ end of the PAM of the target gene, about 23, about 24, or about 25) nucleotides, and a suitable gRNA can be designed for the target sequence.

[0238] For example, when the gene editing system of the present invention includes mutant Cas12a, such as hfCas12Max (mutation site: N243R/E336R/D892R) and Cas12Max (mutation site: N243R), the upstream region of the guiding nucleic acid molecule targeting of the present invention can be A PAM sequence selected from: TNN, or NTN, where N can be A, T, C, or G. For example, when the PAM region of the target gene is determined, those skilled in the art can easily determine about 17 to about 25 (for example, about 17, about 18, about 19, about 20, about 21, about 22) downstream of the 3′ end of the PAM of the target gene, about 23, about 24, or about 25) nucleotides, and a suitable gRNA can be designed for the target sequence.

[0239] For example, the guide nucleic acid molecule may comprise a target sequence, before the PAM region represented by AGG, TGG, GGG and/or CGG in the DNA where the gene encoding the peptidase C64 family member and/or its functionally active fragment is located, of about 10 to about 30 nucleotides. For example, the guide nucleic acid molecule may comprise a target sequence, before the PAM region represented by AGG, TGG, GGG and/or CGG in the DNA where the gene encoding the peptidase C64 family member and/or its functionally active fragment is located, about 15 to about 25, about 17 to about 25, about 19 to about 25, about 20 to about 25, about 21 to about 25, about 23 to about 25, about 15 to about 23, about 17 to about 23, about 19 to about 23, about 20 to about 23, about 21 to about 23, about 15 to about 21, about 17 to about 21, about 19 to about 21, about 20 to about 21, about 15 to a target sequence consisting of about 20, about 17 to about 20, about 19 to about 21, about 15 to about 19, about 17 to about 19, or about 15 to about 17 nucleotides.

[0240] For example, the target sequence may be selected from a region defined by the genomic coordinates shown in Table 1A or a fragment thereof.

[0241] For example, the target sequence of the present invention can be the OUT structural functional domain of TNFAIP3. For example, the target sequence of the present invention can be the zinc finger structural domain of TNFAIP3. For example, the target sequence of the present invention can be chr6: 137871529-137871637, chr6: 137874734-137874807, chr6: 137874895-137874943, chr6: 137875008-137875040, chr6: 137875046-137 875149, chr6: 137875614-137875650, chr6: 137875666-137875724, chr6: 137875789-137875816, chr6: 137875844-137876075, chr6: 137879031-137879264, chr6: 137879337-137879460, chr6: 137879958-137880090, chr6: 137880155-137880268, chr6: 137880275-137880377, chr6: 137880940-137881384.

[0242] For example, the guide nucleic acid molecule can include a targeting domain that is complementary to a target sequence selected from the group consisting of: SEQ ID NOs: 107-212, 1562-2532.

[0243] For example, the guide nucleic acid molecule can include a targeting domain, which can include sequences as set forth in SEQ ID NOs: 1-106, 591-1561, 7267-7324, 7419, 7420.

[0244] For example, the guide nucleic acid molecule can include a targeting domain, which can include sequences as set forth in SEQ ID NOs: 7267-7324, 7419, 7420.

[0245] For example, the ratio of cells expressing the product of the gene of interest in cells obtained by reducing the expression and/or activity of at least one target gene of the cell can be reduced and/or the expression level of the target gene in a single cell can be reduced, compared to cells in which the expression and/or activity of the target gene is unchanged.

[0246] For example, in the method of the present invention, the target gene is expressed in cells obtained by reducing the expression and/or activity of at least one target gene in the cells compared with cells in which the expression and/or activity of the target gene is unchanged. The cell proportion of the product is reduced by at least about 5%. For example, the proportion of cells expressing the product of the gene encoding a peptidase C64 family member and/or a functionally active fragment thereof is reduced by at least about 100%, at least about 90%, at least about 80%, at least about 70%, at least about 60%, at least about 50%, at least about 40%, at least about 30%, at least about 20%, at least about 19%, at least about 18%, at least about 17%, at least about 16%, at least about 15%, at least about 14%, at least about 13%, at least about 12%, at least about 11%, at least about 10%, at least about 9%, at least about 8%, at least about 7%, at least about 6%, or at least about 5%. For example, the proportion of cells expressing the product of the gene encoding a member of the peptidase C64 family and/or a functionally active fragment thereof may range from an observable proportion of cells to 0%. For example, the proportion of cells expressing the product of the gene encoding a peptidase C64 family member and/or a functionally active fragment thereof can be reduced to at least about 100%, at least about 90%, at least about 80%, at least about 70%, at least about 60%, at least about 50%, at least about 40%, at least about 30%, at least about 20%, at least about 19%, at least about 18%, at least about 17%, at least about 16%, at least about 15%, at least about 14%, at least about 13%, at least about 12%, at least about 11%, at least about 10%, at least about 9%, at least about 8%, at least about 7%, at least about 6%, at least about 5%, or at least about 1%. For example, the proportion of cells expressing the product of the gene encoding a peptidase C64 family member and/or a functionally active fragment thereof can be detected by cell flow cytometry.

[0247] For example, in the method of the present invention, the expression of at least one target gene of the cells is reduced and/or the activity is weakened, and the cells obtained express the product of the gene encoding the peptidase C64 family member and/or its functionally active fragment. The ratio can be up to about 95%. For example, the proportion of cells expressing the product of the gene encoding the peptidase C64 family member and/or a functionally active fragment thereof may be at most about 95%, at most about 90%, at most about 80%, at most about 70%, At most about 60%, at most about 50%, at most about 40%, at most about 30%, at most about 20%, at most about 19%, at most about 18%, at most about 17%, at most about 16%, at most about 15%, Up to about 14%, up to about 13%, up to about 12%, up to about 11%, up to about 10%, up to about 9%, up to about 8%, up to about 7%, up to about 6%, or up to about 5%. For example, the cellular proportion expressing the encoded peptidase C64 family member and/or its functionally active fragment can be measured by cell flow cytometry.

[0248] For example, in the method of the present invention, compared with cells in which the expression and/or activity of the target gene are unchanged, the cells obtained by reducing the expression and/or activity of at least one target gene are described in a single cell. The expression level of the target gene can be reduced by at least about 5%. For example, the expression level of the gene of interest in a single cell can be reduced by at least about 100%, at least about 90%, at least about 80%, at least about 70%, at least about 60%, at least about 50%, at least about 40%, at least about 30%, at least about 20%, at least about 19%, at least about 18%, at least about 17%, at least about 16%, at least about 15%, at least about 14%, at least about 13%, at least about 12%, at least About 11%, at least about 10%, at least about 9%, at least about 8%, at least about 7%, at least about 6%, or at least about 5%. For example, the expression level of the target gene in a single cell can range from an observable amount to 0%. For example, the expression level of the gene of interest in a single cell can be reduced to at least about 100%, at least about 90%, at least about 80%, at least about 70%, at least about 60%, at least about 50%, at least about 40%, at least about 30%, at least about 20%, at least about 19%, at least about 18%, at least about 17%, at least about 16%, at least about 15%, at least about 14%, at least about 13%, at least about 12%, at least about 11%, at least about 10%, at least about 9%, at least about 8%, at least about 7%, at least about 6%, at least about 5%, or at least about 1%.

[0249] For example, in the method of the present invention, the expression amount of the target gene in a single cell in the cells obtained by reducing the expression and/or activity of at least one target gene can be the expression and/or activity of the target gene. At most about 95% of the cells are unchanged. For example, the expression level of the gene encoding the peptidase C64 family member and/or the functionally active fragment thereof (eg, the gene encoding TNFAIP3) in a single cell may be the expression level of the gene encoding the peptidase C64 family member and/or the functionally active fragment thereof. At most about 95%, at most about 90%, at most about 80%, at most about 70%, at most about 60%, at most about 50%, at most about 40%, at most about 30% of the cells whose expression and/or activity is unchanged, at most about 20%, at most about 19%, at most about 18%, at most about 17%, at most about 16%, at most about 15%, at most about 14%, at most about 13%, at most about 12%, at most about 11%, up to about 10%, up to about 9%, up to about 8%, up to about 7%, up to about 6%, or up to about 5%.

[0250] For example, the method of the present invention comprises: subjecting said cell to at least one stage of in vitro expansion, wherein in at least one stage of said in vitro expansion, the expression of a member of the peptidase C64 family of the cell is reduced and/or reduced activity.

[0251] For example, the TILs derived from tumor tissue, tumor-related lymph nodes with or without tumor metastasis, tumor metastasis lesions, fragments of para-cancerous tissue, pleural effusion and/or peritoneal effusion and have not been amplified in vitro are subjected to The first stage of in vitro amplification and the second stage of in vitro amplification, and in the second stage of in vitro amplification, the expression of the peptidase C64 family members of the TILs that have been amplified in the first stage of in vitro is reduced and/or Reduced activity.

[0252] For example, the first stage of in vitro expansion is performed for at least about 7 days. For example, the second stage of in vitro expansion is performed for at least about 7 days.

[0253] For example, the cells may be contacted with the one or more cell activating agents and the peptidase C64 family members and/or functionally active fragments thereof may be included in the cells in a single stage of in vitro expansion of the invention. reduced expression and/or activity. For example, the cell activator may comprise an agonist for one or more targets selected from the group consisting of: CD3, CD28, HVEM, CD40L, OX40, and 4-1BB. For example, in a single stage of said in vitro expansion, cells of the invention are exposed to reduced expression and/or attenuated activity of members of the peptidase C64 family and are contacted with one or more cell activators of the invention. For example, in the first stage of in vitro expansion of the present invention, the expression and/or activity of the TIL of the present invention and the peptidase C64 family member of the present invention can be reduced and contacted with one or more cell activators of the present invention. For example, in the second stage of in vitro expansion of the present invention, the expression and/or activity of the peptidase C64 family member of the TIL of the present invention can be reduced and contacted with one or more cell activators of the present invention. For example, in the third stage of in vitro expansion of the present invention, the expression and/or activity of the peptidase C64 family member of the TIL of the present invention can be reduced and contacted with one or more cell activators of the present invention.

[0254] For example, in a single stage of in vitro expansion of the invention, the expression and/or activity of the peptidase C64 family member in the cells of the invention can be reduced substantially simultaneously with exposure to one or more cellular activators of the invention. For example, in a single stage of in vitro expansion of the present invention, the cells of the present invention can be made to reduce the expression and/or activity of peptidase C64 family members first, for example, 2 hours in advance, 4 hours in advance, or 8 hours in advance, 12 hours in advance, 24 hours in advance, or 48 hours in advance, etc., and then contacted with one or more cell activators of the present invention. For example, in a single stage of in vitro expansion of the present invention, the cells of the present invention can be contacted with one or more cell activators of the present invention first, for example, 2 hours in advance, 4 hours in advance, 8 hours in advance, 12 hours in advance, 24 hours in advance, or 48 hours in advance, etc., to reduce the expression and/or activity of the peptidase C64 family members.

[0255] For example, in the first stage of in vitro expansion of the present invention, the TIL of the present invention can be caused to substantially simultaneously reduce the expression and/or activity of peptidase C64 family members and contact one or more cell activators of the present invention. For example, in the second stage of in vitro expansion of the invention, the TIL of the invention can substantially simultaneously reduce the expression and/or activity of peptidase C64 family members and contact one or more cell activators of the invention. For example, in the third stage of in vitro expansion of the invention, the TIL of the invention can substantially simultaneously reduce the expression and/or activity of peptidase C64 family members and contact one or more cell activators of the invention.

[0256] In another aspect, the invention provides a method for culturing tumor infiltrating lymphocytes (TIL), which may comprise: (A) making cells derived from tumor tissue, pleural effusion and/or peritoneal effusion without in vitro expansion The first TIL population is contacted with one or more cell growth factors; wherein the second TIL population is obtained through the step (A); (B) the expression of the peptidase C64 family members of the second TIL population is reduced and/Or the activity is weakened; wherein, the third TIL group is obtained through the step (B).

[0257] In the terminology of one embodiment, the first stage in vitro amplification of the present invention can be used arbitrarily interchangeably with step (A) in the method of the above aspect. In the terminology of one embodiment, the second stage in vitro amplification of the present invention can be used arbitrarily interchangeably with step (B) in the method of the above aspect. In one embodiment of the term, the amplified TIL in vitro in the first stage of the present invention can be used interchangeably with the second TIL population obtained in step (A) of the above method. In one embodiment, the TILs expanded in vitro in the second stage of the present invention can be used interchangeably with the third TIL population obtained in step (B) of the above method. In the terminology of one embodiment, if necessary, the third stage in vitro amplification of the present invention can be used interchangeably with any additional step (C) in the method of the above aspect. In the terminology of one embodiment, if necessary, the third-stage in vitro expanded TIL of the present invention can be used interchangeably with the fourth TIL group obtained by any additional step (C) in the above method.

[0258] In another aspect, the present invention provides a method for culturing tumor infiltrating lymphocytes (TIL), which may include: (A) contacting the first TIL population cells derived from tumor tissue, pleural effusion and/or peritoneal effusion without in vitro amplification with a variety of cell growth factors; wherein, the second TIL population is obtained through step (A); (B) the second TIL population can be contacted with a variety of cell growth factors and cell activator to reduce the expression and/or activity of the peptidase C64 family members, and the TILs are co-cultured with feeder cells; wherein, the third TIL population is obtained through step (B).

[0259] In another aspect, the present invention provides a method for culturing tumor infiltrating lymphocytes (TIL), which may include: (A) culturing cells derived from tumor tissue, pleural effusion and/or peritoneal effusion without in vitro amplification The first TIL population is contacted with cell growth factors; wherein, the second TIL population is obtained through the step (A); (B) the second TIL population can be contacted with cell growth factors, with cell activators, and the expression and/or activity of the peptidase C64 family members is reduced and the TILs are co-cultured with feeder cells. The peptidase C64 family members may include TNFAIP3; wherein, the third TIL population is obtained through the step (B).

[0260] In another aspect, the invention provides a method of culturing tumor-infiltrating lymphocytes (TIL). The method of obtaining TIL cells from subject tissue samples can be to obtain orthotopic tumor samples or metastatic tumor samples from the patient during surgery, and the weight can be at least about 1 g, or multiple pieces of tissue can be merged. Tumor tissue, pleural effusion and/or peritoneal effusion are stored in a sample transport fluid, which may be, for example, a commercially available tumor tissue transport fluid, tumor tissue preservation fluid or tumor tissue transfer fluid, shipping at about 2-8 degrees, processed within 48 hours. The tissue pieces can be mechanically broken to a size of about 1-27 cubic millimeters per piece, transferred into a breathable culture bag or Grex, and cell serum-free medium added with a concentration of 300-9000 IU/mL (for example, it can be 1000-9000 IU/mL, e.g. it can be cultured with IL-2 (6000 IU/mL) for about 3-14 days. Collect the cells in the culture medium and transfer them to a breathable culture bag, or Grex, or Xuri equipment. The cell serum-free culture medium can be added with the CD28 antibody, CD3 antibody and CD28 antibody of the present invention, and magnetic beads containing CD3 antibody and CD28 antibody (such as Dynabeads) and/or a nanomatrix (such as transACT) containing CD3 antibodies and CD28 antibodies, IL-2 at a concentration of 300-9000 IU/mL (such as 1000-9000 IU/mL, such as 6000 IU/mL), and reduced expression and/or activity of peptidase C64 family members (peptidase C64 family members may include TNFAIP3, for example, may be transduced by carrying a ribonucleoprotein complex (RNP) formed by a gRNA containing the present invention and a Cas protein. The cell ratio of genes encoding peptidase C64 family members in TIL is about 95% or less), after activating the TIL of the present invention for a certain period of time, add irradiated PBMC (the ratio of TIL to PBMC is about 1:40 to about 1:400), amplification culture takes about 3-14 days. Cell processing systems can be used to collect cells in the culture medium, wash, freeze, and detect. The CD3 ratio of the final product can be greater than 80%, the cell viability rate can be greater than 50%, and the cells greater than 80% can be memory effector cells and effector cells. IFN-γ can be secreted after stimulation, and/or can be characterized by an increase in the proportion of activated cells.

### ZC3H12A Knockout

[0261] 1. A method for culturing cells, the method comprising: reducing the expression and/or weakening the activity of ZC3H12 family members and/or functionally active fragments thereof of the cells.
[0262] 2. The method of embodiment 1, wherein the cells comprise immune cells.
[0263] 3. The method of embodiment 2, wherein the immune cells comprise phagocytes, lymphocytes, neutrophils, eosinophils and/or basophils.
[0264] 4. The method according to any one of embodiments 2-3, wherein the immune cells comprise monocytes, macrophages and/or dendritic cells.
[0265] 5. The method according to any one of embodiments 2-4, wherein the immune cells are derived from stem cell differentiated immune cells.
[0266] 6. The method of embodiment 5, wherein the stem cells comprise induced pluripotent stem cells (iPSCs).
[0267] 7. The method according to any one of embodiments 2-6, wherein the immune cells comprise B cells, T cells, natural killer cells and/or natural killer-like T cells (NKT).
[0268] 8. The method according to any one of embodiments 2-7, wherein the immune cells comprise αβ T cells and/or γδ T cells.
[0269] 9. The method of any one of embodiments 2-8, wherein the immune cells comprise tumor-infiltrating lymphocytes (TIL).
[0270] 10. The method of embodiment 9, wherein the TIL is a TIL derived from fragments of tumor tissue, pleural effusion and/or peritoneal effusion and/or TIL derived from resuscitation after cryopreservation.
[0271] 11. The method of embodiment 10, wherein the fragment has a volume from about 1 cubic millimeter to about 27 cubic millimeters.
[0272] 12. The method of any one of embodiments 2-11, wherein the immune cell comprises an engineered immune receptor displayed on the cell surface.
[0273] 13. The method of embodiment 12, wherein the engineered immune receptor specifically binds to an antigen expressed on a target cell.
[0274] 14. The method of any one of embodiments 2-13, wherein the immune cell contains chimeric antigen receptors and/or T cell receptors.
[0275] 15. The method according to any one of embodiments 1-14, wherein reducing the expression and/or activity of the ZC3H12 family member of the cell comprises inhibiting the function of a nuclease.
[0276] 16. The method according to any one of embodiments 1-15, wherein the expression of the ZC3H12 family member is reduced and/or the activity is attenuated compared to cells in which the expression and/or activity of the ZC3H12 family member is unchanged. of cells showed improved cellular properties.
[0277] 17. The method of embodiment 16, wherein the improved cell properties comprise one or more selected from the group consisting of: improved cell proliferation capacity, increased proportion of viable cells, improved proportion of cell subpopulations, the increased ability to secrete cytokines and improve the killing ability of tumor cells.
[0278] 18. The method of embodiment 17, wherein the improved proportion of cell subpopulations comprises one or more selected from the group consisting of an increased proportion of activated cells, a reduced proportion of regulatory cells, a reduced proportion of exhausted cells, increased proportion of central memory cells and/or naive cells, decreased proportion of apoptotic cells and increased proportion of stem cell-like cells.
[0279] 19. The method of any one of embodiments 1-18, wherein the ZC3H12 family member comprises a C3H1-type zinc finger domain.
[0280] 20. The method of any one of embodiments 1-19, wherein the ZC3H12 family member comprises ZC3H12A.
[0281] 21. The method of any one of embodiments 1-20, wherein reducing the expression and/or attenuating the activity of a ZC3H12 family member of the cell comprises introducing a gene regulatory system into the cell.
[0282] 22. The method of embodiment 21, wherein the gene regulatory system is capable of Destruction of the ZC3H12 family members at the DNA level.
[0283] 23. The method of any one of embodiments 21-22, wherein the gene regulatory system comprises a guide nucleic acid molecule and an enzymatic protein.
[0284] 24. The method of embodiment 23, wherein reducing the expression and/or activity of the ZC3H12 family member comprises: converting a ribonucleoprotein complex (RNP) comprising the guide nucleic acid molecule and the enzyme protein, An LNP comprising a gRNA and a Cas protein, or an LNP comprising a nucleic acid encoding a gRNA and a Cas protein, is introduced into the cell.
[0285] 25. The method of any one of embodiments 23-24, wherein the enzyme protein comprises a Cas protein, a Cas protein homolog, or a functionally active fragment thereof.
[0286] 26. The method of any one of embodiments 23-25, wherein the guide nucleic acid molecule comprises a guide RNA (gRNA).
[0287] 27. The method of any one of embodiments 23-26, wherein the guide nucleic acid molecule is capable of binding to the sequence of the ZC3H12 family member.
[0288] 28. The method according to any one of embodiments 23-27, wherein the guide nucleic acid molecule is capable of binding to a region selected from the group defined by the genomic coordinates shown in Table 1B, or a fragment thereof.
[0289] 29. The method of any one of embodiments 23-28, wherein the guide nucleic acid molecule is capable of binding to a region selected from the group consisting of: SEQ ID NOs: 281-348, 3116-3698, or fragments thereof.
[0290] 30. The method of any one of embodiments 23-29, wherein the guide nucleic acid molecule is capable of being about 15 to about 25 upstream of the 5′ end of a protospacer adjacent motif (PAM) selected from the group consisting of: Sequence combinations of nucleotides: AGG, TGG, CGG and GGG.
[0291] 31. The method according to any one of embodiments 23-30, wherein the guide nucleic acid molecule comprises a targeting domain comprising SEQ ID NOs: 213-280, 2533-3115, 7325-7345, 7416, and 7417.
[0292] 32. The method according to any one of embodiments 1-31, wherein the expression of the ZC3H12 family member is reduced and/or the activity is attenuated compared to cells in which the expression and/or activity of the ZC3H12 family member is unchanged. The proportion of cells expressing the product of the target gene among the cells decreases and/or the expression level of the target gene in a single cell decreases.
[0293] 33. The method according to any one of embodiments 1-32, wherein among the cells obtained by reducing the expression and/or weakening the activity of the ZC3H12 family member, the proportion of cells expressing the gene of interest is about 95% or the following.
[0294] 34. A cell obtained by the method of any one of embodiments 1-33.
[0295] 35. A composition comprising the cell of embodiment 34.
[0296] 36. A pharmaceutical composition comprising the cell of embodiment 34 and/or the composition of embodiment 35, and optionally a pharmaceutically acceptable carrier.
[0297] 37. A method of affecting cell growth, comprising administering the cell of embodiment 34, the composition of embodiment 35, and/or the pharmaceutical composition of embodiment 36.
[0298] 38. Use of the cell of embodiment 34, the composition of embodiment 35 and/or the pharmaceutical composition of embodiment 36 in the preparation of a medicament, wherein the medicament is used to prevent and/or treat diseases and/or symptoms.
[0299] 39. Use according to embodiment 38, wherein the disease and/or condition comprises a tumor.
[0300] 40. Use according to any one of embodiments 38-39, wherein the disease and/or condition comprises a solid tumor.
[0301] 41. Use according to any one of embodiments 38-40, wherein the disease and/or condition comprises one or more selected from the group consisting of: melanoma, ovarian cancer, cervical cancer, lung cancer, bladder cancer, breast cancer, head and neck cancer, pancreatic cancer, liver cancer, stomach cancer, colorectal cancer and kidney cancer.

[0302] The present invention provides methods for reducing the expression and/or reducing the activity of ZC3H12 family members and/or functionally active fragments thereof in said cells.

[0303] In one aspect, the present invention provides a method for culturing cells so that the expression and/or activity of ZC3H12 family members and/or functionally active fragments thereof is reduced in the cells. For example, the ZC3H12 family member may comprise a C3H1-type zinc finger domain. For example, the ZC3H12 family member may comprise ZC3H12A.

[0304] For example, the target gene of the present invention may be a gene encoding a ZC3H12 family member and/or a functionally active fragment thereof. For example, a cell obtained by reducing the expression and/or attenuating the activity of at least one target gene of the cell may exhibit improved cell properties compared to a cell in which the expression and/or activity of the target gene is unchanged. In one embodiment, the cells whose expression and/or activity of the target gene are unchanged may refer to cells derived from the same donor and which have not had the expression and/or activity of at least one target gene of the cells reduced. In one embodiment, cells whose expression and/or activity of the target gene are unchanged may refer to cells derived from the same donor and in which the expression and/or activity of other genes other than the target gene of the cells have not been altered (e.g., knocking out the other genes has basically no impact on cell function).

[0305] For example, the cells include immune cells. For example, the cells comprise immune effector cells. For example, the cells include immune effector T cells, immune effector NK cells, and immune effector NKT cells. For example, the cells include phagocytes, lymphocytes, neutrophils, eosinophils and/or basophils.

[0306] For example, the cells include monocytes, macrophages, and/or dendritic cells.

[0307] For example, the cells of the present invention also include cells derived from differentiation of stem cells. For example, the cells of the present invention also include cells derived from differentiation of pluripotent stem cells. For example, the stem cells of the present invention can be obtained by induction. For example, the above-mentioned stem cells of the present invention may include induced pluripotent stem cells (iPSCs), embryonic stem cells, bone marrow stem cells, umbilical cord blood stem cells and/or peripheral blood stem cells.

[0308] For example, “stem cells” of the present invention also include pluripotent cells, multipotent cells, precursor cells and progenitor cells. For example, stem cells can be obtained from hematopoietic or mesenchymal stem cells obtained from bone marrow tissue, placental stem cells obtained from placental tissue, embryonic stem cells obtained from embryonic tissue, or embryonic germ cells obtained from the reproductive tissue of the fetus. Exemplary pluripotent stem cells can also be generated from somatic cells by reprogramming them to a pluripotent state through the expression of certain transcription factors associated with pluripotency; these cells are called “induced pluripotent stem cells” or “iPSCs”.

[0309] For example, the cells include B cells, T cells, natural killer cells and/or natural killer-like T cells (NKT). For example, “unmodified cells” may refer to cells in which the genome has not been modified and does not contain a gene regulatory system or contains a control gene regulatory system (e.g., empty vector control, non-targeting gRNA, interfering siRNA, etc.) cells or cell populations. For example, the cells comprise αβ T cells and/or γδ T cells. For example, the cells include tumor-infiltrating lymphocytes (TILs). For example, the TIL is a TIL derived from tumor tissue, tumor-associated lymph nodes with or without tumor metastasis, tumor metastasis, fragments of paracancerous tissue, pleural effusion and/or peritoneal effusion and/or TILs recovered from frozen cells.

[0310] For example, the TILs of the present invention may be TILs and/or TILs recovered after cryopreservation derived from tumor tissue, tumor-associated lymph nodes with or without tumor metastasis, tumor metastasis foci, fragments of paracancerous tissue, pleural effusion and/or peritoneal effusion. For example, tumor tissues can be processed into tumor fragments to obtain TILs of the present invention. For example, the tumor fragments of the present invention have a volume of about 1 to 27 cubic millimeters. For example, the volume of the tumor fragments of the present invention is about 1 cubic millimeter, about 2 cubic millimeters, about 3 cubic millimeters, about 4 cubic millimeters, about 5 cubic millimeters, about 6 cubic millimeters, about 7 cubic millimeters, about 8 cubic millimeters, about 9 cubic millimeters, about 10 cubic millimeters, about 11 cubic millimeters, about 12 cubic millimeters, about 13 cubic millimeters, about 14 cubic millimeters, about 15 cubic millimeters, about 16 cubic millimeters, about 17 cubic millimeters, about 18 cubic millimeters, about 19 cubic millimeters, about 20 cubic millimeters, about 21 cubic millimeters, about 23 cubic millimeters, about 24 cubic millimeters, about 25 cubic millimeters, about 26 cubic millimeters or about 27 cubic millimeters.

[0311] For example, the cells comprise engineered immune receptors displayed on the cell surface. For example, the engineered immune receptor specifically binds to an antigen expressed on a target cell. For example, the cells comprise chimeric antigen receptors and/or T cell receptors.

[0312] In one aspect, the present invention provides a method for culturing tumor-infiltrating lymphocytes (TIL), which may include: reducing the expression and/or activity of ZC3H12 family members and/or functionally active fragments thereof in the TIL.

[0313] For example, TILs derived from tumor tissue, pleural effusion and/or peritoneal effusion without in vitro amplification can be subjected to at least one stage of in vitro amplification, wherein in at least one stage of in vitro amplification, the expression and/or activity of ZC3H12 family members and/or functionally active fragments thereof are reduced in the TIL.

[0314] For example, the TILs of the present invention derived from tumor tissue, pleural effusion and/or peritoneal effusion without in vitro amplification can be subjected to the first stage of in vitro amplification and the second stage of in vitro amplification, and in the second stage of the in vitro amplification, the expression and/or activity of peptidase ZC3H12 family members and/or functionally active fragments thereof in the TIL can be reduced.

[0315] For example, the TILs of the present invention derived from tumor tissue, pleural effusion and/or peritoneal effusion without in vitro amplification can be subjected to the first stage of in vitro amplification and the second stage of in vitro amplification, and in the first stage of the in vitro amplification, the expression and/or activity of peptidase ZC3H12 family members and/or functionally active fragments thereof in the TIL can be reduced.

[0316] For example, the TILs of the present invention derived from tumor tissue, pleural effusion and/or peritoneal effusion without in vitro amplification can be subjected to the first stage of in vitro amplification and the second stage of in vitro amplification, and in the first stage of the in vitro amplification, the expression and/or activity of the peptidase ZC3H12 family members and/or functionally active fragments thereof in the TIL can be reduced, and in the second stage of the in vitro amplification, the expression and/or activity of peptidase ZC3H12 family members and/or functionally active fragments thereof in the TIL can be reduced.

[0317] For example, the TILs of the present invention derived from tumor tissue, pleural effusion and/or peritoneal effusion without in vitro amplification can be subjected to a first-stage in vitro amplification, a second-stage in vitro amplification and a third-stage in vitro amplification, and in the first stage of in vitro amplification of the present invention, the expression and/or activity of peptidase ZC3H12 family members and/or functionally active fragments thereof in the TIL can be reduced.

[0318] For example, the TILs of the present invention derived from tumor tissue, pleural effusion and/or peritoneal effusion without in vitro amplification can be subjected to a first-stage in vitro amplification, a second-stage in vitro amplification and a third-stage in vitro amplification, and in the second stage of in vitro amplification of the present invention, the expression and/or activity of peptidase ZC3H12 family members and/or functionally active fragments thereof in the TIL can be reduced.

[0319] For example, the TILs of the present invention derived from tumor tissue, pleural effusion and/or peritoneal effusion without in vitro amplification can be subjected to a first-stage in vitro amplification, a second-stage in vitro amplification and a third-stage in vitro amplification, and in the third stage of in vitro amplification of the present invention, the expression and/or activity of peptidase ZC3H12 family members and/or functionally active fragments thereof in the TIL can be reduced.

[0320] For example, the TILs of the present invention derived from tumor tissue, pleural effusion and/or peritoneal effusion without in vitro amplification can be subjected to a first-stage in vitro amplification, a second-stage in vitro amplification and a third-stage in vitro amplification, and in the first stage of in vitro expansion of the present invention, the expression and/or activity of peptidase ZC3H12 family members and/or functionally active fragments thereof in the TIL can be reduced, and in the second stage of in vitro expansion of the present invention, the expression and/or activity of peptidase ZC3H12 family members and/or functionally active fragments thereof in the TIL can be reduced.

[0321] For example, the TILs of the present invention derived from tumor tissue, pleural effusion and/or peritoneal effusion without in vitro amplification can be subjected to a first-stage in vitro amplification, a second-stage in vitro amplification and a third-stage in vitro amplification, and in the first stage of in vitro expansion of the present invention, the expression and/or activity of peptidase ZC3H12 family members and/or functionally active fragments thereof in the TIL can be reduced, and in the third stage of in vitro expansion of the present invention, the expression and/or activity of peptidase ZC3H12 family members and/or functionally active fragments thereof in the TIL can be reduced.

[0322] For example, the TILs of the present invention derived from tumor tissue, pleural effusion and/or peritoneal effusion without in vitro amplification can be subjected to a first-stage in vitro amplification, a second-stage in vitro amplification and a third-stage in vitro amplification, and in the second stage of in vitro expansion of the present invention, the expression and/or activity of peptidase ZC3H12 family members and/or functionally active fragments thereof in the TIL can be reduced, and in the third stage of in vitro expansion of the present invention, the expression and/or activity of peptidase ZC3H12 family members and/or functionally active fragments thereof in the TIL can be reduced.

[0323] For example, the TILs of the present invention derived from tumor tissue, pleural effusion and/or peritoneal effusion without in vitro amplification can be subjected to a first-stage in vitro amplification, a second-stage in vitro amplification and a third-stage in vitro amplification, and in the first stage of in vitro expansion of the present invention, the expression and/or activity of peptidase ZC3H12 family members and/or functionally active fragments thereof in the TIL can be reduced, in the second stage of in vitro expansion of the present invention, the expression and/or activity of peptidase ZC3H12 family members and/or functionally active fragments thereof in the TIL can be reduced, and in the third stage of in vitro amplification of the present invention, the expression and/or activity of peptidase ZC3H12 family members and/or functionally active fragments thereof in the TIL can be reduced.

[0324] For example, cells obtained by reducing the expression and/or attenuating the activity of the ZC3H12 family member exhibit improved cellular properties compared to cells in which the expression and/or activity of the ZC3H12 family member is unchanged.

[0325] For example, the improved cell numbers of the present invention are related to the expression of ZC3H12 family members.

[0326] The cell number of the cells of the present invention that reduces the expression and/or weakens the activity of the ZC3H12 family member in at least one in vitro expansion stage can be increased by at least about 1 times, at least about 2 times, compared to cells with unchanged activity. times, at least about 3 times, at least about 4 times, at least about 5 times, at least about 6 times, at least about 7 times, at least about 8 times, at least about 9 times, at least about 10 times, at least about 11 times, at least about 12 times, at least about 13 times, at least about 14 times, at least about 15 times, at least about 20 times, at least about 30 times, at least about 40 times, or at least about 50 times.

[0327] For example, an increased proportion of viable cells can manifest itself as an increase in cell viability. For example, the increased proportion of viable cells of the present invention may refer to reducing the expression and/or activity of the ZC3H12 family member in at least one in vitro expansion stage compared to cells in which the expression and/or activity of the ZC3H12 family member is unchanged. The proportion of viable cells of the cells of the invention with reduced activity can be increased by at least about 100%, at least about 90%, at least about 80%, at least about 70%, at least about 60%, at least about 50%, at least about 40%, at least about 30%, at least about 20%, at least about 19%, at least about 18%, at least about 17%, at least about 16%, at least about 15%, at least about 14%, at least about 13%, at least about 12%, at least about 11%, at least about 10%, at least about 9%, at least about 8%, at least about 7%, at least about 6%, at least about 5%, at least about 4%, at least about 3%, at least about 2%, at least about 1%, at least about 0.5%, at least about 0.4%, at least about 0.3%, at least about 0.2%, or at least about 0.1%.

[0328] For example, the increased cytokine secretion ability of the present invention may refer to an increase in the cytokine secretion ability of a cell selected from the group consisting of: IL-2, IL-6, CD107a, GZMB, TNF-α, and IFN-γ. For example, the improved cytokine secretion ability of the present invention may refer to reducing the expression and/or activity of the ZC3H12 family member in at least one in vitro expansion stage compared to cells in which the expression and/or activity of the ZC3H12 family member is unchanged. Or the proportion of cells secreting cytokines in the cells of the present invention with weakened activity can be increased by at least about 1 time, at least about 2 times, at least about 3 times, at least about 4 times, at least about 5 times, at least about 6 times, at least about 7 times, at least about 8 times, at least about 9 times, at least about 10 times, at least about 11 times, at least about 12 times, at least about 13 times, at least about 14 times, at least about 15 times, at least about 20 times, at least about 30 times, at least about 40 times, or at least about 50 times. For example, the improved cytokine secretion ability of the present invention may refer to secretion in cells of the invention in which the expression and/or activity of the ZC3H12 family member is reduced in at least one in vitro expansion stage compared to cells in which the expression and/or activity of the ZC3H12 family member is unchanged. The cellular proportion of the cytokine can be increased by at least about 100%, at least about 90%, at least about 80%, at least about 70%, at least about 60%, at least about 50%, at least about 40%, at least about 30%, at least about 20%, at least about 19%, at least about 18%, at least about 17%, at least about 16%, at least about 15%, at least about 14%, at least about 13%, at least about 12%, at least about 11%, at least about 10%, at least about 9%, at least about 8%, at least about 7%, at least about 6%, at least about 5%, at least about 4%, at least about 3%, at least about 2%, at least about 1%, at least about 0.5%, at least about 0.4%, at least about 0.3%, at least about 0.2%, or at least about 0.1%.

[0329] For example, the improved tumor cell killing ability of the present invention may refer to reducing the expression and/or activity of the ZC3H12 family member in at least one in vitro expansion stage compared with cells in which the expression and/or activity of the ZC3H12 family member is unchanged. Or the tumor cell killing rate of the cells of the present invention with weakened activity can be increased by at least about 1 time, at least about 2 times, at least about 3 times, at least about 4 times, at least about 5 times, at least about 6 times, at least about 7 times, at least About 8 times, at least about 9 times, at least about 10 times, at least about 11 times, at least about 12 times, at least about 13 times, at least about 14 times, at least about 15 times, at least about 20 times, at least about 30 times, at least About 40 times, or at least about 50 times. For example, the improved tumor cell killing ability of the present invention may refer to reducing the expression and/or activity of the ZC3H12 family member in at least one in vitro expansion stage compared with cells in which the expression and/or activity of the ZC3H12 family member is unchanged. Or the tumor cell killing rate of the cells of the present invention with weakened activity can be increased by at least about 100%, at least about 90%, at least about 80%, at least about 70%, at least about 60%, at least about 50%, at least about 40%, at least About 30%, at least about 20%, at least about 19%, at least about 18%, at least about 17%, at least about 16%, at least about 15%, at least about 14%, at least about 13%, at least about 12%, at least About 11%, at least about 10%, at least about 9%, at least about 8%, at least about 7%, at least about 6%, at least about 5%, at least about 4%, at least about 3%, at least about 2%, at least About 1%, at least about 0.5%, at least about 0.4%, at least about 0.3%, at least about 0.2%, or at least about 0.1%. For example, the tumor cell killing rate of the cells of the present invention can be measured by the IncuCyte system or CFSE and DAPI staining methods. For example, the tumor cell killing of the present invention may refer to the ability of cells to kill solid tumor cells.

[0330] For example, the improved cell subpopulation ratio of the present invention may comprise one or more selected from the following group: increased CD8⁺ cell proportion, increased central memory cell and/or naive cell proportion, decreased regulatory cell proportion, increased activated cell proportion, increased tumor-specific cell proportion, and stem cell-like cell proportion increased.

[0331] For example, the proportion of CD8⁺ cells, central memory cells and/or naive cells, activated cells, tumor-specific cells and/or stem cell-like cells can be increased by at least about 100%, at least about 90%, at least about 80%, at least about 70%, at least about 60%, at least about 50%, at least about 40%, at least about 30%, at least about 20%, at least about 19%, at least about 18%, at least about 17%, at least about 16%, at least about 15%, at least about 14%, at least about 13%, at least about 12%, at least about 11%, at least about 10%, at least about 9%, at least about 8%, at least about 7%, at least about 6%, at least about 5%, at least about 4%, at least about 3%, at least about 2%, at least about 1%, at least about 0.5%, at least about 0.4%, at least about 0.3%, at least about 0.2%, or at least about 0.1%.

[0332] For example, the reduced proportion of exhausted cells of the present invention can be increase of PD-1⁺, LAG-3⁺, TIM-3⁺, and/or CD39⁺ cell proportion. For example, the reduced proportion of regulatory cells of the present invention can be reduction of CD4⁺ CD25⁺ Foxp3⁺ cell proportion. For example, the reduced proportion of apoptotic cells of the present invention can be reduction of CD95⁺ caspass3⁺ and/or CD95⁺ DR5⁺ cell proportion.

[0333] For example, the proportion of exhausted cells, regulatory cells and/or apoptotic cells in the cells can be reduced by at least about 100%, at least about 90%, at least about 80%, at least about 70%, at least about 60%, at least about 50%, At least about 40%, at least about 30%, at least about 20%, at least about 19%, at least about 18%, at least about 17%, at least about 16%, at least about 15%, at least about 14%, at least about 13%, At least about 12%, at least about 11%, at least about 10%, at least about 9%, at least about 8%, at least about 7%, at least about 6%, at least about 5%, at least about 4%, at least about 3%, At least about 2%, at least about 1%, at least about 0.5%, at least about 0.4%, at least about 0.3%, at least about 0.2%, or at least about 0.1%, or can be reduced by at least about 1 times, at least about 2 times, at least about 3 times, at least about 4 times, at least about 5 times, at least about 6 times, at least about 7 times, at least about 8 times, at least about 9 times, at least about 10 times, at least about 11 times, at least about 12 times, at least about 13 times, at least about 14 times, at least about 15 times, at least about 20 times, at least about 30 times, at least about 40 times, or at least about 50 times.

[0334] For example, the culture method of the present invention may include a gene editing step for cells. For example, it includes: subjecting the cells to at least one stage of in vitro expansion, wherein a gene regulatory system can be introduced into the cells during at least one stage of the in vitro expansion.

[0335] For example, the gene regulatory system can destroy the target gene at the DNA level. For example, the gene regulatory system can disrupt a region of the target gene or a fragment thereof in the genome of the cell. For example, after using the gene regulation system, the DNA region or fragment thereof where the target gene is located in the cell is sheared, and the expression ability of the target gene is reduced or the activity of the target gene is inhibited. For example, the editing effect of the gene regulation system on the target gene can be long-term and sustained. The genomic region of the present invention is determined based on the hg38 version of the human reference genome.

[0336] For example, the gene regulatory system may include guide nucleic acid molecules and enzymatic proteins. For example, the enzyme protein can have nucleic acid shearing enzyme activity, and the guide nucleic acid molecule can guide the enzyme protein to specifically cut the region where the target gene is located or its fragments. For example, the guide nucleic acid molecule and the enzyme protein may exist in the form of a ribonucleoprotein complex (RNP), or each may exist independently. For example, the enzyme protein may comprise Cas protein. For example, polynucleotides encoding gRNA and Cas protein can be introduced into the target cell, or each independently.

[0337] For example, reducing the expression and/or weakening the activity of at least one target gene of a cell according to the present invention may include: introducing a ribonucleoprotein complex (RNP) containing the guide nucleic acid molecule and the enzyme protein into the cell. For example, the enzyme protein may comprise Cas protein, Cas protein homologues, or functionally active fragments thereof. For example, the guide nucleic acid molecule may comprise guide RNA (gRNA). For example, the guide nucleic acid molecule may comprise guide RNA (gRNA). For example, a complex comprising a polynucleotide encoding a gRNA and a Cas protein can be introduced into the cell. For example, a complex containing gRNA and Cas protein can be introduced into the cell.

[0338] For example, the gRNA can be used to bind to the sequence of the target gene. For example, the binding of the gRNA to the sequence of the target gene can be completely complementary, partially complementary, or can hybridize to the sequence of the target gene under moderately stringent or stringent conditions. For example, the binding of the gRNA to the sequence of the target gene can cause the CRISPR system of the gRNA to specifically cleave the target gene.

[0339] For example, the editing target region of the present invention may be a region before the promoter. For example, the editing target region of the present invention may be a region with high transcription factor binding capacity. For example, the editing target region of the present invention may be a region with a specific number of transcription factor binding numbers. For example, the editing target region of the present invention can be a continuous region with a binding number of about 3 or more transcription factors.

[0340] For example, when the gene editing system includes CRISPR/Cas9, there may be a protospacer adjacent motif (PAM) downstream of the region targeted by the guiding nucleic acid molecule of the present invention, and the protospacer adjacent motif (PAM) may be AGG, TGG, GGG or CGG. For example, when the PAM region of the target gene is determined, those skilled in the art can easily determine about 15 to about 25 (for example, about 15, about 16, about 17, about 18, about 19, about 20) upstream of the 5′ end of the PAM of the target gene, about 21, about 22, about 23, about 24, about 25) nucleotides, and a suitable gRNA can be designed for the target sequence. For example, the guide nucleic acid molecule is capable of binding to a sequence consisting of about 15 to about 25 nucleotides upstream of the 5′ end of a protospacer adjacent motif (PAM) selected from the group consisting of: AGG, TGG, GGG, and CGG.

[0341] For example, when the gene editing system includes CRISPR/Cas12, there may be a protospacer adjacent motif (PAM) upstream of the region targeted by the guiding nucleic acid molecule of the present invention, and the protospacer adjacent motif (PAM) may be NTTN, TTYN, VTTV, TRTV, TTTV, TATV, TYCV, TNN, or NTN, where Nis A, T, C, or G, Y is T or C, Vis A, C, or G, and R is A or G. For example, when the PAM region of the target gene is determined, those skilled in the art can easily determine about 15 to about 25 (for example, about 15, about 16, about 17, about 18, about 19, about 20) downstream of the 3′ end of the PAM of the target gene, about 21, about 22, about 23, about 24, about 25) nucleotides, and a suitable gRNA can be designed for the target sequence. For example, the guide nucleic acid molecule can bind to a sequence consisting of about 15 to about 25 nucleotides downstream of the 3′ end of the protospacer adjacent motif (PAM) selected from the group consisting of: NTTN, TTYN, VTTV, TRTV, TTTV, TATV, TYCV, TNN, or NTN, where Nis A, T, C, or G, Y is T or C, Vis A, C, or G, and R is A or G.

[0342] For example, when the gene editing system of the present invention includes wild-type Cas12a (also known as Cpf1, such as AsCas12a, FnCas12a, LbCas12a, BbCas12a, CMaCas12a and OsCas12a), the upstream region of the guiding nucleic acid molecule targeting of the present invention can be selected from the following PAM sequence: NTTN, where N can be A, T, C or G. For example, when the PAM region of the target gene is determined, those skilled in the art can easily determine about 17 to about 25 (for example, about 17, about 18, about 19, about 20, about 21, about 22) downstream of the 3′ end of the PAM of the target gene, about 23, about 24, or about 25) nucleotides, and a suitable gRNA can be designed for the target sequence.

[0343] For example, when the gene editing system of the present invention includes mutant Cas12a, such as enAsCas12a (mutation sites E174R, S542R and K548R), the upstream of the region targeted by the guiding nucleic acid molecule of the present invention can have a PAM sequence selected from the following: TTYN (TTTN/TTCN), VTTV (ATTV/CTTV/GTTV), or TRTV (TATV/TGTV), where N can be A, T, C or G, Y can be Tor C, V can be A, C or G, R Can be A or G. For example, when the PAM region of the target gene is determined, those skilled in the art can easily determine about 17 to about 25 (for example, about 17, about 18, about 19, about 20, about 21, about 22) downstream of the 3′ end of the PAM of the target gene, about 23, about 24, or about 25) nucleotides, and a suitable gRNA can be designed for the target sequence.

[0344] For example, when the gene editing system of the present invention includes mutant Cas12a, such as opAsCas12a (mutation sites: E174R and S542R), the upstream of the region targeted by the guiding nucleic acid molecule of the present invention can have a PAM sequence selected from the following: TTTV (TTTA, TTTC, or TTTG), where V can be A, C, or G. For example, when the PAM region of the target gene is determined, those skilled in the art can easily determine about 17 to about 25 (for example, about 17, about 18, about 19, about 20, about 21, about 22) downstream of the 3′ end of the PAM of the target gene, about 23, about 24, or about 25) nucleotides, and a suitable gRNA can be designed for the target sequence.

[0345] For example, when the gene editing system of the present invention includes mutant Cas12a, such as AsCas12a Ultra (mutation sites: M537R and F870L), the upstream of the region targeted by the guiding nucleic acid molecule of the present invention can have a PAM sequence selected from the following: TTTV, TATV, Or TYCV, where V can be A, C or G and Y can be T or C. For example, when the PAM region of the target gene is determined, those skilled in the art can easily determine about 17 to about 25 (for example, about 17, about 18, about 19, about 20, about 21, about 22) downstream of the 3′ end of the PAM of the target gene, about 23, about 24, or about 25) nucleotides, and a suitable gRNA can be designed for the target sequence.

[0346] For example, when the gene editing system of the present invention includes mutant Cas12a, such as hfCas12Max (mutation site: N243R/E336R/D892R) and Cas12Max (mutation site: N243R), the upstream region of the guiding nucleic acid molecule targeting of the present invention can be A PAM sequence selected from: TNN, or NTN, where N can be A, T, C, or G. For example, when the PAM region of the target gene is determined, those skilled in the art can easily determine about 17 to about 25 (for example, about 17, about 18, about 19, about 20, about 21, about 22) downstream of the 3′ end of the PAM of the target gene, about 23, about 24, or about 25) nucleotides, and a suitable gRNA can be designed for the target sequence.

[0347] For example, the guide nucleic acid molecule may comprise a target sequence, before the PAM region represented by AGG, TGG, GGG and/or CGG in the DNA where the gene encoding the ZC3H12 family member and/or its functionally active fragment is located, of about 10 to about 30 nucleotides.

[0348] For example, the guide nucleic acid molecule may comprise a target sequence, before the PAM region represented by AGG, TGG, GGG and/or CGG in the DNA where the gene encoding the ZC3H12 family member and/or its functionally active fragment is located, of about 15 to about 25 and about 17 to about 25, about 19 to about 25, about 20 to about 25, about 21 to about 25, about 23 to about 25, about 15 to about 23, about 17 to about 23, about 19 to about 23, about 20 to about 23, about 21 to about 23, about 15 to about 21, about 17 to about 21, about 19 to about 21, about 20 to about 21, about 15 to about 20, A target sequence consisting of about 17 to about 20, about 19 to about 21, about 15 to about 19, about 17 to about 19, or about 15 to about 17 nucleotides.

[0349] For example, the target sequence may be selected from a region defined by the genomic coordinates shown in Table 1B or a fragment thereof.

[0350] For example, the target sequence of the present invention can be the C3H1 zinc finger structural functional domain of ZC3H12A. For example, the target sequence of the present invention may be R_22_chr1:37482635-37482714.

[0351] For example, the guide nucleic acid molecule can include a targeting domain that is complementary to a target sequence selected from the group consisting of: SEQ ID NOs: 281-348, 3116-3698.

[0352] For example, the guide nucleic acid molecule can include a targeting domain, which can include sequences as set forth in SEQ ID NOs: 213-280, 2533-3115, 7325-7345, 7416, 7417.

[0353] For example, the guide nucleic acid molecule can include a targeting domain, which can include sequences as set forth in SEQ ID NOs: 7325-7345, 7416, 7417.

[0354] For example, the ratio of cells expressing the product of the gene of interest in cells obtained by reducing the expression and/or activity of at least one target gene of the cell can be reduced and/or the expression level of the target gene in a single cell can be reduced, compared to cells in which the expression and/or activity of the target gene is unchanged.

[0355] For example, in the method of the present invention, the target gene is expressed in cells obtained by reducing the expression and/or activity of at least one target gene in the cells compared with cells in which the expression and/or activity of the target gene is unchanged. The cell proportion of the product is reduced by at least about 5%. For example, the proportion of cells expressing the product of the gene encoding the ZC3H12 family member and/or a functionally active fragment thereof is reduced by at least about 100%, at least about 90%, at least about 80%, at least about 70%, at least about 60%, at least About 50%, at least about 40%, at least about 30%, at least about 20%, at least about 19%, at least about 18%, at least about 17%, at least about 16%, at least about 15%, at least about 14%, at least About 13%, at least about 12%, at least about 11%, at least about 10%, at least about 9%, at least about 8%, at least about 7%, at least about 6%, or at least about 5%. For example, the proportion of cells expressing the product of the gene encoding a ZC3H12 family member and/or a functionally active fragment thereof can range from an observable proportion of cells to 0%. For example, the proportion of cells expressing the product of the gene encoding the ZC3H12 family member and/or a functionally active fragment thereof can be reduced to at least about 100%, at least about 90%, at least about 80%, at least about 70%, at least about 60%, at least about 50%, at least about 40%, at least about 30%, at least about 20%, at least about 19%, at least about 18%, at least about 17%, at least about 16%, at least about 15%, at least about 14%, at least about 13%, at least about 12%, at least about 11%, at least about 10%, at least about 9%, at least about 8%, at least about 7%, at least about 6%, at least about 5%, or at least about 1%. For example, the proportion of cells expressing the product of the gene encoding a ZC3H12 family member and/or a functionally active fragment thereof can be detected by cell flow cytometry.

[0356] For example, the proportion of cells expressing the product of the gene encoding the ZC3H12 family member and/or its functionally active fragment among the cells obtained by reducing the expression and/or weakening the activity of at least one target gene of the cells in the method of the present invention can be is at most about 95%. For example, the proportion of cells expressing the product of the gene encoding the ZC3H12 family member and/or a functionally active fragment thereof may be at most about 95%, at most about 90%, at most about 80%, at most about 70%, at most about 60%, up to about 50%, up to about 40%, up to about 30%, up to about 20%, up to about 19%, up to about 18%, up to about 17%, up to about 16%, up to about 15%, up to about 14%, up to about 13%, up to about 12%, up to about 11%, up to about 10%, up to about 9%, up to about 8%, up to about 7%, up to about 6%, or up to about 5%. For example, the proportion of cells expressing the product of the gene encoding a peptidase ZC3H12 family member and/or a functionally active fragment thereof can be detected by cell flow cytometry.

[0357] For example, in the method of the present invention, compared with cells in which the expression and/or activity of the target gene are unchanged, the cells obtained by reducing the expression and/or activity of at least one target gene are described in a single cell. The expression level of the target gene can be reduced by at least about 5%. For example, the expression level of the gene of interest in a single cell can be reduced by at least about 100%, at least about 90%, at least about 80%, at least about 70%, at least about 60%, at least about 50%, at least about 40%, at least About 30%, at least about 20%, at least about 19%, at least about 18%, at least about 17%, at least about 16%, at least about 15%, at least about 14%, at least about 13%, at least about 12%, at least About 11%, at least about 10%, at least about 9%, at least about 8%, at least about 7%, at least about 6%, or at least about 5%. For example, the expression level of the target gene in a single cell can range from an observable amount to 0%. For example, the expression level of the gene of interest in a single cell can be reduced to at least about 100%, at least about 90%, at least about 80%, at least about 70%, at least about 60%, at least about 50%, at least about 40%, at least about 30%, at least about 20%, at least about 19%, at least about 18%, at least about 17%, at least about 16%, at least about 15%, at least about 14%, at least about 13%, at least about 12%, at least about 11%, at least about 10%, at least about 9%, at least about 8%, at least about 7%, at least about 6%, at least about 5%, or at least about 1%.

[0358] For example, in the method of the present invention, the expression amount of the target gene in a single cell in the cells obtained by reducing the expression and/or activity of at least one target gene can be the expression and/or activity of the target gene. At most about 95% of the cells are unchanged. For example, the expression level of the gene encoding the ZC3H12 family member and/or the functionally active fragment thereof (e.g., the gene encoding ZC3H12A) in a single cell in the cell may be the expression and/or the expression level of the gene encoding the ZC3H12 family member and/or the functionally active fragment thereof, or up to about 95%, up to about 90%, up to about 80%, up to about 70%, up to about 60%, up to about 50%, up to about 40%, up to about 30%, up to about 20% of the cells with unchanged activity %, up to about 19%, up to about 18%, up to about 17%, up to about 16%, up to about 15%, up to about 14%, up to about 13%, up to about 12%, up to about 11%, up to about 10%, up to about 9%, up to about 8%, up to about 7%, up to about 6%, or up to about 5%.

[0359] For example, the methods of the invention comprise: subjecting the cells to at least one stage of in vitro expansion, wherein the expression and/or activity of ZC3H12 family members of the cells is reduced during at least one stage of the in vitro expansion.

[0360] For example, the TILs derived from tumor tissue, tumor-related lymph nodes with or without tumor metastasis, tumor metastasis lesions, fragments of para-cancerous tissue, pleural effusion and/or peritoneal effusion and have not been amplified in vitro are subjected to The first stage of in vitro amplification and the second stage of in vitro amplification, and in the second stage of in vitro amplification, the expression and/or activity of the ZC3H12 family members of the TILs that have been amplified in the first stage of in vitro are reduced.

[0361] For example, the first stage of in vitro expansion is performed for at least about 7 days. For example, the second stage of in vitro expansion is performed for at least about 7 days.

[0362] For example, the cells may be contacted with the one or more cellular activators and the cells may comprise expression of ZC3H12 family members and/or functionally active fragments thereof in a single stage of in vitro expansion of the invention, and/or reduced activity. For example, the cell activator may comprise an agonist for one or more targets selected from the group consisting of: CD3, CD28, HVEM, CD40L, OX40, and 4-1BB. For example, in a single stage of said in vitro expansion, cells of the invention are made to have reduced expression and/or attenuated activity of ZC3H12 family members and are contacted with one or more cell activators of the invention. For example, in the first stage of in vitro expansion of the present invention, the expression and/or activity of the TIL of the present invention and the ZC3H12 family member of the present invention can be reduced and contacted with one or more cell activators of the present invention. For example, in the second stage of in vitro expansion of the present invention, the expression and/or activity of the ZC3H12 family members of the TIL of the present invention can be reduced and contacted with one or more cell activators of the present invention. For example, in the third stage of in vitro expansion of the present invention, the expression and/or activity of the ZC3H12 family members of the TIL of the present invention can be reduced and contacted with one or more cell activators of the present invention.

[0363] For example, in a single stage of in vitro expansion of the invention, the expression and/or activity of the peptidase ZC3H12 family member in the cells of the invention can be reduced substantially simultaneously with exposure to one or more cellular activators of the invention. For example, in a single stage of in vitro amplification of the present invention, the cells of the present invention can be made to reduce the expression and/or activity of ZC3H12 family members first, for example, 2 hours in advance, 4 hours in advance, 8 hours in advance, or 8 hours in advance. 12 hours, 24 hours in advance, or 48 hours in advance, etc., and then contacted with one or more cell activators of the present invention. For example, in a single stage of in vitro expansion of the present invention, the cells of the present invention can be contacted with one or more cell activators of the present invention first, for example, 2 hours in advance, 4 hours in advance, 8 hours in advance, 12 hours in advance, 24 hours in advance, or 48 hours in advance, etc., to reduce the expression and/or activity of ZC3H12 family members.

[0364] For example, in the first stage of in vitro expansion of the invention, the TIL of the invention can substantially simultaneously reduce the expression and/or activity of ZC3H12 family members and contact one or more cell activators of the invention. For example, in the second stage of in vitro expansion of the present invention, the TIL of the present invention can substantially simultaneously reduce the expression and/or activity of ZC3H12 family members and contact one or more cell activators of the present invention. For example, in the third stage of in vitro expansion of the present invention, the TIL of the present invention can substantially simultaneously reduce the expression and/or activity of ZC3H12 family members and contact one or more cell activators of the present invention.

[0365] In another aspect, the invention provides a method for culturing tumor infiltrating lymphocytes (TIL), which may comprise: (A) making cells derived from tumor tissue, pleural effusion and/or peritoneal effusion without in vitro expansion The first TIL population is contacted with one or more cell growth factors; wherein the second TIL population is obtained through the step (A); (B) the expression of the peptidase ZC3H12 family members of the second TIL population is reduced and/Or the activity is weakened; wherein, the third TIL group is obtained through the step (B).

[0366] In the terminology of one embodiment, the first stage in vitro amplification of the present invention can be used arbitrarily interchangeably with step (A) in the method of the above aspect. In the terminology of one embodiment, the second stage in vitro amplification of the present invention can be used interchangeably with step (B) in the method of the above aspect. In one embodiment, the TILs expanded in vitro in the first stage body of the present invention can be optionally replaced with the second TIL population obtained in step (A) of the above method. In one embodiment, the TILs expanded in vitro in the second stage of the present invention can be used arbitrarily interchangeably with the third TIL population obtained in step (B) of the above method. In one embodiment, if necessary, the third stage in vitro amplification of the present invention can be used interchangeably with any additional step (C) in the method of the above aspect. In the one embodiment, if necessary, the third-stage in vitro expanded TIL of the present invention can be used interchangeably with the fourth TIL group obtained by any additional step (C) in the above method.

[0367] In another aspect, the present invention provides a method for culturing tumor infiltrating lymphocytes (TIL), which may include: (A) culturing cells derived from tumor tissue, pleural effusion and/or peritoneal effusion without in vitro amplification The first TIL population is contacted with a variety of cell growth factors; wherein, the second TIL population is obtained through the step (A); (B) the second TIL population can be contacted with a variety of cell growth factors, and with a variety of cell growth factors, and the cell activator is contacted to reduce the expression and/or activity of ZC3H12 family members, and the TILs are co-cultured with feeder cells; wherein, the third TIL population is obtained through the step (B).

[0368] In another aspect, the present invention provides a method for culturing tumor infiltrating lymphocytes (TIL), which may include: (A) culturing cells derived from tumor tissue, pleural effusion and/or peritoneal effusion without in vitro amplification The first TIL population is contacted with cell growth factors; wherein, the second TIL population is obtained through the step (A); (B) the second TIL population can be contacted with cell growth factors, with cell activators, and the expression and/or activity of ZC3H12 family members is reduced and the TILs are co-cultured with feeder cells. The ZC3H12 family members may include ZC3H12A; wherein the third TIL population is obtained through the step (B).

[0369] In another aspect, the invention provides a method of culturing tumor-infiltrating lymphocytes (TIL). The method of obtaining TIL cells from subject tissue samples can be to obtain orthotopic tumor samples or metastatic tumor samples from the patient during surgery, and the weight can be at least about 1 g, or multiple pieces of tissue can be merged. Tumor tissue, pleural effusion and/or peritoneal effusion are stored in a sample transport fluid, which may be, for example, a commercially used tumor tissue transport fluid, tumor tissue preservation fluid or tumor tissue transfer fluid, shipped at about 2-8 degrees, processed within 48 hours. The tissue pieces can be mechanically broken to a size of about 1-27 cubic millimeters per piece, transferred into a breathable culture bag or Grex, and added with cell serum-free medium and a concentration of 300-9000 IU/mL (for example, it can be 1000-9000 IU/mL, for example It can be cultured with IL-2 (6000 IU/mL) for about 3-14 days. Collect the cells in the culture medium and transfer them to a breathable culture bag, or Grex, or Xuri equipment. The cell serum-free culture medium can be added with the CD28 antibody, CD3 antibody and CD28 antibody of the present invention, and magnetic beads containing CD3 antibody and CD28 antibody (such as Dynabeads) and/or a nanomatrix (such as transACT) containing CD3 antibodies and CD28 antibodies, IL-2 at a concentration of 300-9000 IU/mL (for example, it can be 1000-9000 IU/mL, for example, it can be 6000 IU/mL), and the expression and/or activity of the ZC3H12 family members is reduced (ZC3H12 family members can include ZC3H12A, for example, ZC3H12 can be encoded in the TIL by transduction with a ribonucleoprotein complex (RNP) formed by carrying the gRNA of the present invention and the Cas protein) The cell ratio of genes of family members is about 95% or less), after activating the TIL of the present invention for a certain period of time, add irradiated PBMC (the ratio of TIL to PBMC is about 1:40 to about 1:400), and expand and culture for about 3-14 days. Cell processing systems can be used to collect cells in the culture medium, wash, freeze, and detect. The CD3 ratio of the final product can be greater than 80%, the cell viability rate can be greater than 50%, and the cells greater than 80% can be memory effector cells and effector cells. IFN-γ can be secreted after stimulation, and/or can be characterized by an increase in the proportion of activated cells.

### SOCS1 Knockout

[0370] 1. A method for culturing cells, the method comprising: reducing the expression and/or weakening the activity of STAT-induced STAT inhibitor (SSI) family members and/or functionally active fragments thereof of the cells.
[0371] 2. The method of embodiment 1, wherein the cells comprise immune cells.
[0372] 3. The method of embodiment 2, wherein the immune cells comprise phagocytes, lymphocytes, neutrophils, eosinophils and/or basophils.
[0373] 4. The method according to any one of embodiments 2-3, wherein the immune cells comprise monocytes, macrophages, and/or dendritic cells.
[0374] 5. The method according to any one of embodiments 2-4, wherein the immune cells are derived from stem cell differentiated immune cells.
[0375] 6. The method of embodiment 5, wherein the stem cells comprise induced pluripotent stem cells (iPSCs).
[0376] 7. The method according to any one of embodiments 2-6, wherein the immune cells comprise B cells, T cells, natural killer cells and/or natural killer-like T cells (NKT).
[0377] 8. The method according to any one of embodiments 2-7, wherein the immune cells comprise αβ T cells and/or γδ T cells.
[0378] 9. The method of any one of embodiments 2-8, wherein the immune cells comprise tumor-infiltrating lymphocytes (TIL).
[0379] 10. The method of embodiment 9, wherein the TIL is a TIL derived from fragments of tumor tissue, pleural effusion and/or peritoneal effusion and/or TIL derived from resuscitation after cryopreservation.
[0380] 11. The method of embodiment 10, wherein the fragment has a volume from about 1 cubic millimeter to about 27 cubic millimeters.
[0381] 12. The method of any one of embodiments 2-11, wherein the immune cell comprises an engineered immune receptor displayed on the cell surface.
[0382] 13. The method of embodiment 12, wherein the engineered immune receptor specifically binds to an antigen expressed on a target cell.
[0383] 14. The method according to any one of embodiments 2-13, wherein the immune cell comprises a chimeric antigen receptor and/or a T cell receptor.
[0384] 15. The method of any one of embodiments 1-14, wherein reducing expression and/or attenuating activity of a STAT-induced STAT inhibitor (SSI) family member of the cell comprises the function of inhibiting negative regulation of cytokine signaling.
[0385] 16. The method of any one of embodiments 1-15, wherein the STAT-induced STAT is compared to cells in which the expression and/or activity of STAT-induced STAT inhibitor (SSI) family members is unchanged. Cells obtained with reduced expression and/or attenuated activity of inhibitor (SSI) family members display improved cellular properties.
[0386] 17. The method of embodiment 16, wherein the improved cell properties comprise one or more selected from the group consisting of: improved cell proliferation capacity, increased proportion of viable cells, improved proportion of cell subpopulations, increased ability to secrete cytokines and improve the killing ability of tumor cells.
[0387] 18. The method of embodiment 17, wherein the improved proportion of cell subpopulations comprises one or more selected from the group consisting of an increased proportion of activated cells, a reduced proportion of regulatory cells, a reduced proportion of exhausted cells. proportion, increased proportion of central memory cells and/or naive cells, decreased proportion of apoptotic cells and increased proportion of stem cell-like cells.
[0388] 19. The method of any one of embodiments 1-18, wherein the STAT-induced STAT inhibitor (SSI) family member comprises an SH2 domain.
[0389] 20. The method of any one of embodiments 1-19, wherein the STAT-induced STAT inhibitor (SSI) family member comprises SOCS1.
[0390] 21. The method of any one of embodiments 1-20, wherein reducing the expression and/or activity of a STAT-induced STAT inhibitor (SSI) family member comprises introducing a gene regulatory system into the cell.
[0391] 22. The method of embodiment 21, wherein the gene regulatory system is capable of disrupting the STAT-induced STAT inhibitor (SSI) family member at the DNA level.
[0392] 23. The method of any one of embodiments 21-22, wherein the gene regulatory system comprises a guide nucleic acid molecule and an enzymatic protein.
[0393] 24. The method of embodiment 23, wherein reducing the expression and/or attenuating the activity of the STAT-induced STAT inhibitor (SSI) family member comprises: converting a ribose containing the guide nucleic acid molecule and the enzyme protein A nucleoprotein complex (RNP), an LNP comprising a gRNA and a Cas protein, or an LNP comprising a nucleic acid encoding a gRNA and a Cas protein is introduced into the cell.
[0394] 25. The method of any one of embodiments 23-24, wherein the enzyme protein comprises a Cas protein, a Cas protein homologue, or a functionally active fragment thereof.
[0395] 26. The method of any one of embodiments 23-25, wherein the guide nucleic acid molecule comprises a guide RNA (gRNA).
[0396] 27. The method of any one of embodiments 23-26, wherein the guide nucleic acid molecule is capable of binding to a sequence of a member of the STAT-induced STAT inhibitor (SSI) family.
[0397] 28. The method according to any one of embodiments 23-27, wherein the guide nucleic acid molecule is capable of binding to a region selected from the group defined by the genomic coordinates shown in Table 1C, or a fragment thereof.
[0398] 29. The method of any one of embodiments 23-28, wherein the guide nucleic acid molecule is capable of binding to a region selected from the group consisting of: SEQ ID NOs: 399-448, 4393-5086, or fragments thereof.
[0399] 30. The method of any one of embodiments 23-29, wherein the guide nucleic acid molecule is capable of being located about 15 to about 25 upstream of the 5′ end of a protospacer adjacent motif (PAM) selected from the group consisting of: Sequence combinations of nucleotides: AGG, TGG, CGG and GGG.
[0400] 31. The method of any one of embodiments 23-30, wherein the guide nucleic acid molecule comprises a targeting domain comprising SEQ ID NOs: 349-398, 3699-4392, 7346—The sequence shown in any one of 7375 and 7418.
[0401] 32. The method of any one of embodiments 1-31, wherein the STAT-induced STAT is compared to cells in which expression and/or activity of STAT-induced STAT inhibitor (SSI) family members is unchanged. The expression and/or activity of inhibitor (SSI) family members is reduced and the proportion of cells expressing the product of the target gene in the cells obtained is reduced and/or the expression level of the target gene in a single cell is reduced.
[0402] 33. The method according to any one of embodiments 1-32, wherein the gene of interest is expressed in cells obtained by reducing the expression and/or attenuating the activity of the STAT-induced STAT inhibitor (SSI) family member. The proportion of cells is about 95% or less.
[0403] 34. A cell obtained by the method of any one of embodiments 1-33.
[0404] 35. A composition comprising the cell of embodiment 34.
[0405] 36. A pharmaceutical composition comprising the cell of embodiment 34 and/or the composition of embodiment 35, and optionally a pharmaceutically acceptable carrier.
[0406] 37. A method of affecting cell growth, comprising administering the cell of embodiment 34, the composition of embodiment 35, and/or the pharmaceutical composition of embodiment 36.
[0407] 38. Use of the cell of embodiment 34, the composition of embodiment 35 and/or the pharmaceutical composition of embodiment 36 in the preparation of a medicament, wherein the medicament is used to prevent and/or treat diseases and/or symptoms.
[0408] 39. Use according to embodiment 38, wherein the disease and/or condition comprises a tumor.
[0409] 40. Use according to any one of embodiments 38-39, wherein the disease and/or condition comprises a solid tumor.
[0410] 41. Use according to any one of embodiments 38-40, wherein the disease and/or condition comprises one or more selected from the group consisting of: melanoma, ovarian cancer, cervical cancer, lung cancer, bladder cancer, breast cancer, head and neck cancer, pancreatic cancer, liver cancer, stomach cancer, colorectal cancer and kidney cancer.

[0411] The present invention provides methods for reducing the expression and/or attenuating the activity of STAT-induced STAT inhibitor (SSI) family members and/or functionally active fragments thereof in said cells.

[0412] In one aspect, the present invention provides a method for culturing cells such that the expression and/or activity of STAT-induced STAT inhibitor (SSI) family members and/or functionally active fragments thereof is reduced in the cells. For example, the STAT-induced STAT inhibitor (SSI) family member may comprise an SH2 domain. For example, the STAT-induced STAT inhibitor (SSI) family member may comprise SOCS1.

[0413] For example, the target gene of the present invention may be a gene encoding a STAT-induced STAT inhibitor (SSI) family member and/or a functionally active fragment thereof. For example, a cell obtained by reducing the expression and/or attenuating the activity of at least one target gene of the cell may exhibit improved cell properties compared to a cell in which the expression and/or activity of the target gene is unchanged. In one embodiment, cells whose expression and/or activity of the target gene are unchanged may refer to cells originating from the same donor and in which the expression and/or activity of at least one target gene of the cell has not been reduced. In one embodiment, cells whose expression and/or activity of the target gene are unchanged may refer to cells derived from the same donor and in which the expression and/or activity of other genes other than the target gene of the cells have not been altered (e.g., knocking out the other genes has basically no impact on cell function).

[0414] For example, the cells include immune cells. For example, the cells comprise immune effector cells. For example, the cells include immune effector T cells, immune effector NK cells, and immune effector NKT cells. For example, the cells include phagocytes, lymphocytes, neutrophils, eosinophils, and/or basophils.

[0415] For example, the cells include monocytes, macrophages, and/or dendritic cells.

[0416] For example, the cells of the present invention also include cells derived from differentiation of stem cells. For example, the cells of the present invention also include cells derived from differentiation of pluripotent stem cells. For example, the stem cells of the present invention can be obtained by induction. For example, the above-mentioned stem cells of the present invention may include induced pluripotent stem cells (iPSCs), embryonic stem cells, bone marrow stem cells, umbilical cord blood stem cells and/or peripheral blood stem cells.

[0417] For example, “stem cells” of the present invention also include pluripotent cells, multipotent cells, precursor cells and progenitor cells. For example, stem cells can be obtained from hematopoietic or mesenchymal stem cells obtained from bone marrow tissue, placental stem cells obtained from placental tissue, embryonic stem cells obtained from embryonic tissue, or embryonic germ cells obtained from the reproductive tissue of the fetus. Exemplary pluripotent stem cells can also be generated from somatic cells by reprogramming them to a pluripotent state through the expression of certain transcription factors associated with pluripotency; these cells are called “induced pluripotent stem cells” or “iPSCs”.

[0418] For example, the cells include B cells, T cells, natural killer cells and/or natural killer-like T cells (NKT). For example, “unmodified cells” or “unmodified cells” may refer to cells in which the genome has not been modified and does not contain a gene regulatory system or contains a control gene regulatory system (e.g., empty vector control, non-targeting gRNA, interfering siRNA, etc.) cells or cell populations. For example, the cells comprise αβ T cells and/or γδ T cells. For example, the cells include tumor-infiltrating lymphocytes (TILs). For example, the TIL is a TIL derived from tumor tissue, tumor-associated lymph nodes with or without tumor metastasis, tumor metastasis, fragments of paracancerous tissue, pleural effusion and/or peritoneal effusion and/or TILs recovered from cryopreservation.

[0419] For example, the TILs of the present invention may be TILs and/or sources derived from tumor tissue, tumor-associated lymph nodes with or without tumor metastasis, tumor metastasis foci, fragments of paracancerous tissue, pleural effusion and/or peritoneal effusion. TILs recovered after cryopreservation. For example, TILs of the present invention can be obtained by processing tumor tissue into tumor fragments. For example, the tumor fragments of the present invention have a volume of about 1-27 cubic millimeters. For example, the volume of the tumor fragments of the present invention is about 1 cubic millimeter, about 2 cubic millimeters, about 3 cubic millimeters, about 4 cubic millimeters, about 5 cubic millimeters, about 6 cubic millimeters, about 7 cubic millimeters, about 8 cubic millimeters, about 9 cubic millimeters, about 10 cubic millimeters, about 11 cubic millimeters, about 12 cubic millimeters, about 13 cubic millimeters, about 14 cubic millimeters, about 15 cubic millimeters, about 16 cubic millimeters, about 17 cubic millimeters, about 18 cubic millimeters, about 19 cubic millimeters, about 20 cubic millimeters, about 21 cubic millimeters, about 23 cubic millimeters, about 24 cubic millimeters, about 25 cubic millimeters, about 26 cubic millimeters or about 27 cubic millimeters.

[0420] For example, the cells comprise engineered immune receptors displayed on the cell surface. For example, the engineered immune receptor specifically binds to an antigen expressed on a target cell. For example, the cells comprise chimeric antigen receptors and/or T cell receptors.

[0421] In one aspect, the present invention provides a method for culturing tumor infiltrating lymphocytes (TIL), which may include: reducing expression and/or activity of STAT-induced STAT inhibitor (SSI) family members and/or functionally active fragments thereof.

[0422] For example, TILs derived from tumor tissue, pleural effusion and/or peritoneal effusion without in vitro amplification can be subjected to at least one stage of in vitro amplification, wherein in at least one stage of in vitro amplification, the expression and/or activity of STAT-induced STAT inhibitor (SSI) family members and/or functionally active fragments thereof are reduced in the TIL.

[0423] For example, the TILs of the present invention derived from tumor tissue, pleural effusion and/or peritoneal effusion without in vitro amplification can be subjected to the first stage of in vitro amplification and the second stage of in vitro amplification, and in the second stage of the in vitro amplification, the expression and/or activity of STAT-induced STAT inhibitor (SSI) family members and/or functionally active fragments thereof in the TIL can be reduced.

[0424] For example, the TILs of the present invention derived from tumor tissue, pleural effusion and/or peritoneal effusion without in vitro amplification can be subjected to the first stage of in vitro amplification and the second stage of in vitro amplification, and in the first stage of the in vitro amplification, the expression and/or activity of STAT-induced STAT inhibitor (SSI) family members and/or functionally active fragments thereof in the TIL can be reduced.

[0425] For example, the TILs of the present invention derived from tumor tissue, pleural effusion and/or peritoneal effusion without in vitro amplification can be subjected to the first stage of in vitro amplification and the second stage of in vitro amplification, and in the first stage of the in vitro amplification, the expression and/or activity of the STAT-induced STAT inhibitor (SSI) family members and/or functionally active fragments thereof in the TIL can be reduced, and in the second stage of the in vitro amplification, the expression and/or activity of STAT-induced STAT inhibitor (SSI) family members and/or functionally active fragments thereof in the TIL can be reduced

[0426] For example, the TILs of the present invention derived from tumor tissue, pleural effusion and/or peritoneal effusion without in vitro amplification can be subjected to a first-stage in vitro amplification, a second-stage in vitro amplification and a third-stage in vitro amplification, and in the first stage of in vitro amplification of the present invention, the expression and/or activity of STAT-induced STAT inhibitor (SSI) family members and/or functionally active fragments thereof in the TIL can be reduced.

[0427] For example, the TILs of the present invention derived from tumor tissue, pleural effusion and/or peritoneal effusion without in vitro amplification can be subjected to a first-stage in vitro amplification, a second-stage in vitro amplification and a third-stage in vitro amplification, and in the second stage of in vitro amplification of the present invention, the expression and/or activity of STAT-induced STAT inhibitor (SSI) family members and/or functionally active fragments thereof in the TIL can be reduced.

[0428] For example, the TILs of the present invention derived from tumor tissue, pleural effusion and/or peritoneal effusion without in vitro amplification can be subjected to a first-stage in vitro amplification, a second-stage in vitro amplification and a third-stage in vitro amplification, and in the third stage of in vitro amplification of the present invention, the expression and/or activity of STAT-induced STAT inhibitor (SSI) family members and/or functionally active fragments thereof in the TIL can be reduced.

[0429] For example, the TILs of the present invention derived from tumor tissue, pleural effusion and/or peritoneal effusion without in vitro amplification can be subjected to a first-stage in vitro amplification, a second-stage in vitro amplification and a third-stage in vitro amplification, and in the first stage of in vitro expansion of the present invention, the expression and/or activity of STAT-induced STAT inhibitor (SSI) family members and/or functionally active fragments thereof in the TIL can be reduced, and in the second stage of in vitro expansion of the present invention, the expression and/or activity of STAT-induced STAT inhibitor (SSI) family members and/or functionally active fragments thereof in the TIL can be reduced.

[0430] For example, the TILs of the present invention derived from tumor tissue, pleural effusion and/or peritoneal effusion without in vitro amplification can be subjected to a first-stage in vitro amplification, a second-stage in vitro amplification and a third-stage in vitro amplification, and in the first stage of in vitro expansion of the present invention, the expression and/or activity of STAT-induced STAT inhibitor (SSI) family members and/or functionally active fragments thereof in the TIL can be reduced, and in the third stage of in vitro expansion of the present invention, the expression and/or activity of STAT-induced STAT inhibitor (SSI) family members and/or functionally active fragments thereof in the TIL can be reduced.

[0431] For example, the TILs of the present invention derived from tumor tissue, pleural effusion and/or peritoneal effusion without in vitro amplification can be subjected to a first-stage in vitro amplification, a second-stage in vitro amplification and a third-stage in vitro amplification, and in the second stage of in vitro expansion of the present invention, the expression and/or activity of STAT-induced STAT inhibitor (SSI) family members and/or functionally active fragments thereof in the TIL can be reduced, and in the third stage of in vitro expansion of the present invention, the expression and/or activity of STAT-induced STAT inhibitor (SSI) family members and/or functionally active fragments thereof in the TIL can be reduced.

[0432] For example, the TILs of the present invention derived from tumor tissue, pleural effusion and/or peritoneal effusion without in vitro amplification can be subjected to a first-stage in vitro amplification, a second-stage in vitro amplification and a third-stage in vitro amplification, and in the first stage of in vitro expansion of the present invention, the expression and/or activity of STAT-induced STAT inhibitor (SSI) family members and/or functionally active fragments thereof in the TIL can be reduced, in the second stage of in vitro expansion of the present invention, the expression and/or activity of STAT-induced STAT inhibitor (SSI) family members and/or functionally active fragments thereof in the TIL can be reduced, and in the third stage of in vitro amplification of the present invention, the expression and/or activity of STAT-induced STAT inhibitor (SSI) family members and/or functionally active fragments thereof in the TIL can be reduced.

[0433] For example, cells obtained by reducing the expression and/or attenuating the activity of the STAT-induced STAT inhibitor (SSI) family member exhibit improved cellular properties compared to cells in which the expression and/or activity of the STAT-induced STAT inhibitor (SSI) family member is unchanged.

[0434] For example, improved cell numbers of the present invention refer to STAT-induced STAT inhibitor (SSI) family members whose expression and/or activity are unchanged compared to cells in which said STAT is induced during at least one in vitro expansion stage. The cell number of cells of the invention with reduced expression and/or weakened activity of STAT inhibitor (SSI) family members can be increased by at least about 1 time, at least about 2 times, at least about 3 times, at least about 4 times, at least about 5 times, At least about 6 times, at least about 7 times, at least about 8 times, at least about 9 times, at least about 10 times, at least about 11 times, at least about 12 times, at least about 13 times, at least about 14 times, at least about 15 times, At least about 20 times, at least about 30 times, at least about 40 times, or at least about 50 times.

[0435] For example, an increased proportion of viable cells can manifest itself as an increase in cell viability. For example, the increased proportion of viable cells of the present invention may refer to STAT-induced STAT inhibitor (SSI) family members in which the expression and/or activity of the STAT inhibitor (SSI) family members is unchanged compared to cells that increase the proportion of viable cells in at least one in vitro expansion stage. Decreased expression of induced STAT inhibitor (SSI) family members and/or the proportion of viable cells of the cells of the invention with reduced activity can be increased by at least about 100%, at least about 90%, at least about 80%, at least about 70%, at least about 60%, at least about 50%, at least about 40%, at least about 30%, at least about 20%, at least about 19%, at least about 18%, at least about 17%, at least about 16%, at least about 15%, at least about 14%, at least about 13%, at least about 12%, at least about 11%, at least about 10%, at least about 9%, at least about 8%, at least about 7%, at least about 6%, at least about 5%, at least about 4%, at least about 3%, at least about 2%, at least about 1%, at least about 0.5%, at least about 0.4%, at least about 0.3%, at least about 0.2%, or at least about 0.1%.

[0436] For example, the increased cytokine secretion ability of the present invention may refer to an increase in the cytokine secretion ability of a cell selected from the group consisting of: IL-2, IL-6, CD107a, GZMB, TNF-α, and IFN-γ. For example, the improved cytokine secretion capacity of the present invention may refer to the STAT-induced STAT inhibitor (SSI) family member's expression and/or activity compared to cells whose expression and/or activity is unchanged in at least one in vitro expansion stage. The proportion of cells secreting cytokines in the cells of the present invention in which the expression and/or activity of STAT-induced STAT inhibitor (SSI) family members is reduced can be increased by at least about 1 times, at least about 2 times, at least about 3 times, at least about 4 times. times, at least about 5 times, at least about 6 times, at least about 7 times, at least about 8 times, at least about 9 times, at least about 10 times, at least about 11 times, at least about 12 times, at least about 13 times, at least about 14 times, at least about 15 times, at least about 20 times, at least about 30 times, at least about 40 times, or at least about 50 times. For example, the improved cytokine secretion capacity of the present invention may refer to the STAT-induced STAT inhibitor (SSI) family member's expression and/or activity compared to cells whose expression and/or activity is unchanged in at least one in vitro expansion stage. The proportion of cells secreting cytokines in the cells of the invention in which the expression and/or activity of STAT-induced STAT inhibitor (SSI) family members is reduced can be increased by at least about 100%, at least about 90%, at least about 80%, at least about 70%, at least about 60%, at least about 50%, at least about 40%, at least about 30%, at least about 20%, at least about 19%, at least about 18%, at least about 17%, at least about 16%, at least about 15%, at least about 14%, at least about 13%, at least about 12%, at least about 11%, at least about 10%, at least about 9%, at least about 8%, at least about 7%, at least about 6%, at least about 5%, at least about 4%, at least about 3%, at least about 2%, at least about 1%, at least about 0.5%, at least about 0.4%, at least about 0.3%, at least about 0.2%, or at least about 0.1%.

[0437] For example, the improved tumor cell killing ability of the present invention may refer to the improvement of the STAT-induced STAT inhibitor (SSI) family member's expression and/or activity compared to cells in which the expression and/or activity of the STAT-induced STAT inhibitor (SSI) family members is not changed in at least one in vitro expansion stage. The tumor cell killing rate of the cells of the present invention with reduced expression and/or weakened activity of STAT-induced STAT inhibitor (SSI) family members can be increased by at least about 1 time, at least about 2 times, at least about 3 times, at least about 4 times, At least about 5 times, at least about 6 times, at least about 7 times, at least about 8 times, at least about 9 times, at least about 10 times, at least about 11 times, at least about 12 times, at least about 13 times, at least about 14 times, At least about 15 times, at least about 20 times, at least about 30 times, at least about 40 times, or at least about 50 times. For example, the improved tumor cell killing ability of the present invention may refer to the improvement of the STAT-induced STAT inhibitor (SSI) family member's expression and/or activity compared to cells in which the expression and/or activity of the STAT-induced STAT inhibitor (SSI) family members is not changed in at least one in vitro expansion stage. The tumor cell killing rate of the cells of the present invention with reduced expression and/or activity of STAT-induced STAT inhibitor (SSI) family members can be increased by at least about 100%, at least about 90%, at least about 80%, at least about 70%, At least about 60%, at least about 50%, at least about 40%, at least about 30%, at least about 20%, at least about 19%, at least about 18%, at least about 17%, at least about 16%, at least about 15%, At least about 14%, at least about 13%, at least about 12%, at least about 11%, at least about 10%, at least about 9%, at least about 8%, at least about 7%, at least about 6%, at least about 5%, At least about 4%, at least about 3%, at least about 2%, at least about 1%, at least about 0.5%, at least about 0.4%, at least about 0.3%, at least about 0.2%, or at least about 0.1%. For example, the tumor cell killing rate of the cells of the present invention can be measured by the IncuCyte system or CFSE and DAPI staining methods. For example, tumor cell killing of cells of the present invention may refer to the ability of the cells to kill solid tumor cells.

[0438] For example, the improved cell subpopulation ratio of the present invention may comprise one or more selected from the following group: increased CD8⁺ Cell proportion, increased central memory cell and/or naive cell proportion, decreased regulatory cell proportion, increased activated cell proportion, increased tumor-specific cell proportion, and stem cell-like cell proportion increased.

[0439] For example, the proportion of CD8⁺ cells, central memory cells and/or immature cells, activated cells, tumor-specific cells and/or stem cell-like cells can be increased by at least about 100%, at least about 90%, at least about 80%, at least about 70%, at least about 60%, at least about 50%, at least about 40%, At least about 30%, at least about 20%, at least about 19%, at least about 18%, at least about 17%, at least about 16%, at least about 15%, at least about 14%, at least about 13%, at least about 12%, At least about 11%, at least about 10%, at least about 9%, at least about 8%, at least about 7%, at least about 6%, at least about 5%, at least about 4%, at least about 3%, at least about 2%, At least about 1%, at least about 0.5%, at least about 0.4%, at least about 0.3%, at least about 0.2%, or at least about 0.1%.

[0440] For example, the reduced proportion of exhausted cells of the present invention can be increase of PD-1⁺, LAG-3⁺, TIM-3⁺, and/or CD39⁺ cell proportion. For example, the reduced proportion of regulatory cells of the present invention can be reduction of CD4⁺ CD25⁺ Foxp3⁺ cell proportion. For example, the reduced proportion of apoptotic cells of the present invention can be reduction of CD95⁺ caspass3⁺ and/or CD95⁺ DR5⁺ cell proportion.

[0441] For example, the proportion of exhausted cells, regulatory cells and/or apoptotic cells in the cells can be reduced by at least about 100%, at least about 90%, at least about 80%, at least about 70%, at least about 60%, at least about 50%, At least about 40%, at least about 30%, at least about 20%, at least about 19%, at least about 18%, at least about 17%, at least about 16%, at least about 15%, at least about 14%, at least about 13%, At least about 12%, at least about 11%, at least about 10%, at least about 9%, at least about 8%, at least about 7%, at least about 6%, at least about 5%, at least about 4%, at least about 3%, At least about 2%, at least about 1%, at least about 0.5%, at least about 0.4%, at least about 0.3%, at least about 0.2%, or at least about 0.1%, or can be reduced by at least about 1 times, at least about 2 times, at least about 3 times, at least about 4 times, at least about 5 times, at least about 6 times, at least about 7 times, at least about 8 times, at least about 9 times, at least about 10 times, at least about 11 times, at least about 12 times, at least about 13 times, at least about 14 times, at least about 15 times, at least about 20 times, at least about 30 times, at least about 40 times, or at least about 50 times.

[0442] For example, the culture method of the present invention may include a gene editing step for cells. For example, it includes: subjecting the cells to at least one stage of in vitro expansion, wherein a gene regulatory system can be introduced into the cells during at least one stage of the in vitro expansion.

[0443] For example, the gene regulatory system can destroy the target gene at the DNA level. For example, the gene regulatory system can disrupt a region of the target gene or a fragment thereof in the genome of the cell. For example, after using the gene regulation system, the DNA region or fragment thereof where the target gene is located in the cell is sheared, and the expression ability of the target gene is reduced or the activity of the target gene is inhibited. For example, the editing effect of the gene regulation system on the target gene can be long-term and sustained. The genomic region of the present invention is determined based on the hg38 version of the human reference genome.

[0444] For example, the gene regulatory system may include guide nucleic acid molecules and enzymatic proteins. For example, the enzyme protein can have nucleic acid shearing enzyme activity, and the guide nucleic acid molecule can guide the enzyme protein to specifically cut the region where the target gene is located or its fragments. For example, the guide nucleic acid molecule and the enzyme protein may exist in the form of a ribonucleoprotein complex (RNP), or each may exist independently. For example, the enzyme protein may comprise Cas protein. For example, polynucleotides encoding gRNA and Cas protein can be introduced into the target cell, or each independently.

[0445] For example, reducing the expression and/or weakening the activity of at least one target gene of a cell according to the present invention may include: introducing a ribonucleoprotein complex (RNP) containing the guide nucleic acid molecule and the enzyme protein into the cell. For example, the enzyme protein may comprise Cas protein, Cas protein homologues, or functionally active fragments thereof. For example, the guide nucleic acid molecule may comprise guide RNA (gRNA). For example, the guide nucleic acid molecule may comprise guide RNA (gRNA). For example, a complex comprising a polynucleotide encoding a gRNA and a Cas protein can be introduced into the cell. For example, a complex containing gRNA and Cas protein can be introduced into the cell.

[0446] For example, the gRNA can be used to bind to the sequence of the target gene. For example, the binding of the gRNA to the sequence of the target gene may be completely complementary, partially complementary, or may hybridize to the sequence of the target gene under moderately stringent or stringent conditions. For example, the binding of the gRNA to the sequence of the target gene can cause the CRISPR system to specifically cut the target gene.

[0447] For example, the editing target region of the present invention may be a region before the promoter. For example, the editing target region of the present invention may be a region with high transcription factor binding capacity. For example, the editing target region of the present invention may be a region with a specific number of transcription factor binding numbers. For example, the editing target region of the present invention may be a continuous region with a binding number of about 3 or more transcription factors.

[0448] For example, when the gene editing system includes CRISPR/Cas9, there may be a protospacer adjacent motif (PAM) downstream of the region targeted by the guiding nucleic acid molecule of the present invention, and the protospacer adjacent motif (PAM) may be AGG, TGG, GGG or CGG. For example, when the PAM region of the target gene is determined, those skilled in the art can easily determine about 15 to about 25 (for example, about 15, about 16, about 17, about 18, about 19, about 20) upstream of the 5′ end of the PAM of the target gene, about 21, about 22, about 23, about 24, about 25) nucleotides, and a suitable gRNA can be designed for the target sequence. For example, the guide nucleic acid molecule is capable of binding to a sequence consisting of about 15 to about 25 nucleotides upstream of the 5′ end of a protospacer adjacent motif (PAM) selected from the group consisting of: AGG, TGG, GGG, and CGG.

[0449] For example, when the gene editing system includes CRISPR/Cas12, there may be a protospacer adjacent motif (PAM) upstream of the region targeted by the guiding nucleic acid molecule of the present invention, and the protospacer adjacent motif (PAM) may be NTTN, TTYN, VTTV, TRTV, TTTV, TATV, TYCV, TNN, or NTN, where Nis A, T, C, or G, Y is T or C, Vis A, C, or G, and R is A or G. For example, when the PAM region of the target gene is determined, those skilled in the art can easily determine about 15 to about 25 (for example, about 15, about 16, about 17, about 18, about 19, about 20) downstream of the 3′ end of the PAM of the target gene, about 21, about 22, about 23, about 24, about 25) nucleotides, and a suitable gRNA can be designed for the target sequence. For example, the guide nucleic acid molecule can bind to a sequence consisting of about 15 to about 25 nucleotides downstream of the 3′ end of the protospacer adjacent motif (PAM) selected from the group consisting of: NTTN, TTYN, VTTV, TRTV, TTTV, TATV, TYCV, TNN, or NTN, where N is A, T, C, or G, Y is T or C, Vis A, C, or G, and R is A or G.

[0450] For example, when the gene editing system of the present invention includes wild-type Cas12a (also known as Cpf1, such as AsCas12a, FnCas12a, LbCas12a, BbCas12a, CMaCas12a and OsCas12a), the upstream region of the guiding nucleic acid molecule targeting of the present invention can be selected from the following PAM sequence: NTTN, where N can be A, T, C or G. For example, when the PAM region of the target gene is determined, those skilled in the art can easily determine about 17 to about 25 (for example, about 17, about 18, about 19, about 20, about 21, about 22) downstream of the 3′ end of the PAM of the target gene, about 23, about 24, or about 25) nucleotides, and a suitable gRNA can be designed for the target sequence.

[0451] For example, when the gene editing system of the present invention includes mutant Cas12a, such as enAsCas12a (mutation sites E174R, S542R and K548R), the upstream of the region targeted by the guiding nucleic acid molecule of the present invention can have a PAM sequence selected from the following: TTYN (TTTN/TTCN), VTTV (ATTV/CTTV/GTTV), or TRTV (TATV/TGTV), where N can be A, T, C or G, Y can be T or C, V can be A, C or G, R Can be A or G. For example, when the PAM region of the target gene is determined, those skilled in the art can easily determine about 17 to about 25 (for example, about 17, about 18, about 19, about 20, about 21, about 22) downstream of the 3′ end of the PAM of the target gene, about 23, about 24, or about 25) nucleotides, and a suitable gRNA can be designed for the target sequence.

[0452] For example, when the gene editing system of the present invention includes mutant Cas12a, such as opAsCas12a (mutation sites: E174R and S542R), the upstream of the region targeted by the guiding nucleic acid molecule of the present invention can have a PAM sequence selected from the following: TTTV (TTTA, TTTC, or TTTG), where V can be A, C, or G. For example, when the PAM region of the target gene is determined, those skilled in the art can easily determine about 17 to about 25 (for example, about 17, about 18, about 19, about 20, about 21, about 22) downstream of the 3′ end of the PAM of the target gene, about 23, about 24, or about 25) nucleotides, and a suitable gRNA can be designed for the target sequence.

[0453] For example, when the gene editing system of the present invention includes mutant Cas12a, such as AsCas12a Ultra (mutation sites: M537R and F870L), the upstream of the region targeted by the guiding nucleic acid molecule of the present invention can have a PAM sequence selected from the following: TTTV, TATV, Or TYCV, where V can be A, C or G and Y can be T or C. For example, when the PAM region of the target gene is determined, those skilled in the art can easily determine about 17 to about 25 (for example, about 17, about 18, about 19, about 20, about 21, about 22) downstream of the 3′ end of the PAM of the target gene, about 23, about 24, or about 25) nucleotides, and a suitable gRNA can be designed for the target sequence.

[0454] For example, when the gene editing system of the present invention includes mutant Cas12a, such as hfCas12Max (mutation site: N243R/E336R/D892R) and Cas12Max (mutation site: N243R), the upstream region of the guiding nucleic acid molecule targeting of the present invention can be A PAM sequence selected from: TNN, or NTN, where N can be A, T, C, or G. For example, when the PAM region of the target gene is determined, those skilled in the art can easily determine about 17 to about 25 (for example, about 17, about 18, about 19, about 20, about 21, about 22) downstream of the 3′ end of the PAM of the target gene, about 23, about 24, or about 25) nucleotides, and a suitable gRNA can be designed for the target sequence.

[0455] For example, the guide nucleic acid molecule may comprise a target sequence, before the PAM region represented by AGG, TGG, GGG and/or CGG in the DNA where the gene encoding the STAT-induced STAT inhibitor (SSI) family member and/or its functionally active fragment is located, of about 10 to about 30 nucleotides. For example, the guide nucleic acid molecule may comprise a target sequence, before the PAM region represented by AGG, TGG, GGG and/or CGG in the DNA where the gene encoding the STAT-induced STAT inhibitor (SSI) family member and/or its functionally active fragment is located, of about 15 to about 25 and about 17 to about 25, about 19 to about 25, about 20 to about 25, about 21 to about 25, about 23 to about 25, about 15 to about 23, about 17 to about 23, about 19 to about 23, about 20 to about 23, about 21 to about 23, about 15 to about 21, about 17 to about 21, about 19 to about 21, about 20 to about 21, about 15 to about 20, A target sequence consisting of about 17 to about 20, about 19 to about 21, about 15 to about 19, about 17 to about 19, or about 15 to about 17 nucleotides.

[0456] For example, the target sequence may be selected from the region defined by the genomic coordinates shown in Table 1C or a fragment thereof.

[0457] For example, the guide nucleic acid molecule can include a targeting domain that is complementary to a target sequence selected from the group consisting of: SEQ ID NOs: 399-448, 4393-5086.

[0458] For example, the guide nucleic acid molecule can include a targeting domain, which can include sequences as set forth in SEQ ID NOs: 349-398, 3699-4392, 7346-7375, 7418.

[0459] For example, the guide nucleic acid molecule can include a targeting domain, which can include sequences as shown in SEQ ID NOs: 7346-7375, 7418.

[0460] For example, the ratio of cells expressing the product of the gene of interest in cells obtained by reducing the expression and/or activity of at least one target gene of the cell compared to cells in which the expression and/or activity of the target gene is unchanged. can be reduced and/or the expression level of the target gene in a single cell can be reduced.

[0461] For example, in the method of the present invention, the target gene is expressed in cells obtained by reducing the expression and/or activity of at least one target gene in the cells compared with cells in which the expression and/or activity of the target gene is unchanged. The cell proportion of the product is reduced by at least about 5%. For example, the proportion of cells expressing the product of the gene encoding a STAT-induced STAT inhibitor (SSI) family member and/or a functionally active fragment thereof is reduced by at least about 100%, at least about 90%, at least about 80%, at least about 70%, at least about 60%, at least about 50%, at least about 40%, at least about 30%, at least about 20%, at least about 19%, at least about 18%, at least about 17%, at least about 16%, at least about 15%, at least about 14%, at least about 13%, at least about 12%, at least about 11%, at least about 10%, at least about 9%, at least about 8%, at least about 7%, at least about 6%, or at least about 5%. For example, the proportion of cells expressing the product of the gene encoding a STAT-induced STAT inhibitor (SSI) family member and/or a functionally active fragment thereof can range from an observable proportion of cells to 0%. For example, the proportion of cells expressing the product of the gene encoding a STAT-induced STAT inhibitor (SSI) family member and/or a functionally active fragment thereof can be reduced to at least about 100%, at least about 90%, at least about 80%, at least About 70%, at least about 60%, at least about 50%, at least about 40%, at least about 30%, at least about 20%, at least about 19%, at least about 18%, at least about 17%, at least about 16%, at least About 15%, at least about 14%, at least about 13%, at least about 12%, at least about 11%, at least about 10%, at least about 9%, at least about 8%, at least about 7%, at least about 6%, at least About 5%, or at least about 1%. For example, the proportion of cells expressing the product of the gene encoding a STAT-induced STAT inhibitor (SSI) family member and/or a functionally active fragment thereof can be detected by cell flow cytometry.

[0462] For example, in the method of the present invention, the expression of at least one target gene of the cells is reduced and/or the activity is weakened, and the cells obtained express the STAT-induced STAT inhibitor (SSI) family member and/or its functionally active fragment. The cellular proportion of the gene's product may be up to about 95%. For example, the proportion of cells expressing the product of the gene encoding a STAT-induced STAT inhibitor (SSI) family member and/or a functionally active fragment thereof may be at most about 95%, at most about 90%, at most about 80%, at most about 70%, at most about 60%, at most about 50%, at most about 40%, at most about 30%, at most about 20%, at most about 19%, at most about 18%, at most about 17%, at most about 16%, at most about 15%, at most about 14%, at most about 13%, at most about 12%, at most about 11%, at most about 10%, at most about 9%, at most about 8%, at most about 7%, at most about 6%, or at most about 5%. For example, the proportion of cells expressing the product of the gene encoding a STAT-induced STAT inhibitor (SSI) family member and/or a functionally active fragment thereof can be detected by cell flow cytometry.

[0463] For example, in the method of the present invention, compared with cells in which the expression and/or activity of the target gene are unchanged, the cells obtained by reducing the expression and/or activity of at least one target gene are described in a single cell. The expression level of the target gene can be reduced by at least about 5%. For example, the expression level of the gene of interest in a single cell can be reduced by at least about 100%, at least about 90%, at least about 80%, at least about 70%, at least about 60%, at least about 50%, at least about 40%, at least about 30%, at least about 20%, at least about 19%, at least about 18%, at least about 17%, at least about 16%, at least about 15%, at least about 14%, at least about 13%, at least about 12%, at least about 11%, at least about 10%, at least about 9%, at least about 8%, at least about 7%, at least about 6%, or at least about 5%. For example, the expression level of the target gene in a single cell can range from an observable amount to 0%. For example, the expression level of the gene of interest in a single cell can be reduced to at least about 100%, at least about 90%, at least about 80%, at least about 70%, at least about 60%, at least about 50%, at least about 40%, at least about 30%, at least about 20%, at least about 19%, at least about 18%, at least about 17%, at least about 16%, at least about 15%, at least about 14%, at least about 13%, at least about 12%, at least about 11%, at least about 10%, at least about 9%, at least about 8%, at least about 7%, at least about 6%, at least about 5%, or at least about 1%.

[0464] For example, in the method of the present invention, the expression amount of the target gene in a single cell in the cells obtained by reducing the expression and/or activity of at least one target gene can be the expression and/or activity of the target gene. At most about 95% of the cells are unchanged. For example, the expression level of a gene encoding a STAT-induced STAT inhibitor (SSI) family member and/or a functionally active fragment thereof (e.g., a gene encoding SOCS1) in a single cell in a cell can be the amount of the gene encoding a STAT-induced STAT inhibitor. Up to about 95%, up to about 90%, up to about 80%, up to about 70%, up to about 60%, up to about 60% of cells in which the expression and/or activity of (SSI) family members and/or functionally active fragments thereof is unchanged. 50%, up to about 40%, up to about 30%, up to about 20%, up to about 19%, up to about 18%, up to about 17%, up to about 16%, up to about 15%, up to about 14%, up to about 13%, up to about 12%, up to about 11%, up to about 10%, up to about 9%, up to about 8%, up to about 7%, up to about 6%, or up to about 5%.

[0465] For example, methods of the present invention comprise: subjecting said cells to at least one stage of in vitro expansion, wherein in at least one stage of said in vitro expansion, the STAT-induced STAT inhibitor (SSI) family member of said cells is expression is reduced and/or activity is reduced.

[0466] For example, the TILs derived from tumor tissue, tumor-associated lymph nodes, with or without tumor metastasis, tumor metastasis, fragments of paracancerous tissue, pleural effusion and/or peritoneal effusion and has not been amplified in vitro have undergone the first stage of in vitro amplification and the second stage of in vitro amplification, and in the second stage In the staged in vitro amplification, the expression and/or activity of the STAT-induced STAT inhibitor (SSI) family members of the TILs amplified in the first stage in vitro is reduced.

[0467] For example, the first stage of in vitro expansion is performed for at least about 7 days. For example, the second stage of in vitro expansion is performed for at least about 7 days.

[0468] For example, the cells may be contacted with the one or more cellular activators and the cells may comprise STAT-inducing STAT inhibitor (SSI) family members and/or reduced expression and/or activity of functionally active fragments thereof. For example, the cell activator may comprise an agonist for one or more targets selected from the group consisting of: CD3, CD28, HVEM, CD40L, OX40, and 4-1BB. For example, in a single stage of said in vitro expansion, the expression and/or activity of STAT-induced STAT inhibitor (SSI) family members of the cells of the invention is reduced and is associated with the activation of one or more cells of the invention. agent contact. For example, in the first stage of in vitro amplification of the present invention, the expression and/or activity of the TIL of the present invention and the STAT-induced STAT inhibitor (SSI) family member of the present invention can be reduced and combined with one or more of the present invention. Exposure to multiple cell activators. For example, in the second stage of in vitro expansion of the present invention, the expression and/or activity of the STAT-induced STAT inhibitor (SSI) family members of the TIL of the present invention can be reduced and combined with one or more cells of the present invention. Activator contact. For example, in the third stage of in vitro expansion of the present invention, the expression and/or activity of the STAT-induced STAT inhibitor (SSI) family members of the TIL of the present invention can be reduced and contacted with one or more cell activators of the present invention.

[0469] For example, in a single stage of in vitro expansion of the present invention, the cells of the present invention can be caused to substantially simultaneously reduce the expression and/or activity of STAT-induced STAT inhibitor (SSI) family members and one or more of the present invention. Exposure to multiple cell activators. For example, in a single stage of in vitro expansion of the present invention, the cells of the present invention can be made to first reduce the expression and/or activity of STAT-induced STAT inhibitor (SSI) family members, for example, 2 hours in advance, 2 hours in advance, 4 hours, 8 hours in advance, 12 hours in advance, 24 hours in advance, or 48 hours in advance, etc., and then contact with one or more cell activators of the present invention. For example, in a single stage of in vitro expansion of the present invention, the cells of the present invention can be contacted with one or more cell activators of the present invention first, for example, 2 hours in advance, 4 hours in advance, 8 hours in advance, 12 hours in advance, 24 hours in advance, or 48 hours in advance, etc., to reduce the expression and/or activity of STAT-induced STAT inhibitor (SSI) family members.

[0470] For example, in the first stage of in vitro expansion of the invention, the TIL of the invention can substantially simultaneously reduce the expression and/or activity of STAT-induced STAT inhibitor (SSI) family members and contact one or more cell activators of the invention. For example, in the second stage of in vitro expansion of the present invention, the TIL of the present invention can substantially simultaneously reduce the expression and/or activity of STAT-induced STAT inhibitor (SSI) family members and contact one or more cell activators of the present invention. For example, in the third stage of in vitro expansion of the present invention, the TIL of the present invention can substantially simultaneously reduce the expression and/or activity of STAT-induced STAT inhibitor (SSI) family members and contact one or more cell activators of the present invention.

[0471] In another aspect, the invention provides a method for culturing tumor infiltrating lymphocytes (TIL), which may comprise: (A) making cells derived from tumor tissue, pleural effusion and/or peritoneal effusion without in vitro expansion. The first TIL population is contacted with one or more cell growth factors; wherein the second TIL population is obtained through the step (A); (B) the second TIL population STAT-induced STAT inhibitor (SSI) family The expression and/or activity of the members is reduced; wherein, the third TIL group is obtained through the step (B).

[0472] In one embodiment, the first stage in vitro amplification of the present invention can be used arbitrarily interchangeably with step (A) in the method of the above aspect. In one embodiment, the second stage in vitro amplification of the present invention can be used interchangeably with step (B) in the method of the above aspect. In one embodiment, the TILs expanded in vitro in the first stage of the present invention can be used interchangeably with the second TIL population obtained in step (A) of the above method. In one embodiment, the second stage body of the present invention

[0473] The externally amplified TIL can be optionally replaced with the third TIL group obtained in step (B) of the above method. In one embodiment, if necessary, the third stage in vitro amplification of the present invention can be used interchangeably with any additional step (C) in the method of the above aspect. In one embodiment, if necessary, the third-stage in vitro expanded TIL of the present invention can be used interchangeably with the fourth TIL group obtained by any additional step (C) in the above method.

[0474] In another aspect, the present invention provides a method for culturing tumor infiltrating lymphocytes (TIL), which may include: (A) culturing cells derived from tumor tissue, pleural effusion and/or peritoneal effusion without in vitro amplification The first TIL population is contacted with a variety of cell growth factors; wherein, the second TIL population is obtained through the step (A); (B) the second TIL population can be contacted with a variety of cell growth factors, and with a variety of cell growth factors, and the cell activator is contacted to reduce the expression and/or activity of STAT-induced STAT inhibitor (SSI) family members, and the TILs are co-cultured with feeder cells; wherein, the third TIL population is obtained through the step (B).

[0475] In another aspect, the present invention provides a method for culturing tumor infiltrating lymphocytes (TIL), which may include: (A) culturing cells derived from tumor tissue, pleural effusion and/or peritoneal effusion without in vitro amplification The first TIL population is contacted with cell growth factors; wherein, the second TIL population is obtained through the step (A); (B) the second TIL population can be contacted with cell growth factors, with cell activators, and the expression and/or activity of STAT-induced STAT inhibitor (SSI) family members is reduced and the TILs are co-cultured with feeder cells. The STAT-induced STAT inhibitor (SSI) family members may include SOC1; wherein the third TIL population is obtained through the step (B).

[0476] In another aspect, the invention provides a method of culturing tumor-infiltrating lymphocytes (TIL). The method of obtaining TIL cells from subject tissue samples can be to obtain orthotopic tumor samples or metastatic tumor samples from the patient during surgery, and the weight can be at least about 1 g, or multiple pieces of tissue can be merged. Tumor tissue, pleural effusion and/or peritoneal effusion are transported in a sample transport fluid, such as a commercially available tumor tissue transport fluid, tumor tissue preservation fluid or tumor tissue transfer fluid, shipped at about 2-8 degrees Celsius, and processed within 48 hours. Tissue blocks can be mechanically broken down to approximately 1-27 cubic mm size, transfer to a breathable culture bag or Grex, add cell serum-free medium and IL-2 with a concentration of 300-9000 IU/mL (for example, it can be 1000-9000 IU/mL, for example, it can be 6000 IU/mL) and culture for about 3-14 days. Collect the cells in the culture medium and transfer them to a breathable culture bag, or Grex, or Xuri equipment. The cell serum-free culture medium can be added with the CD28 antibody, CD3 antibody and CD28 antibody of the present invention, and magnetic beads containing CD3 antibody and CD28 antibody (such as Dynabeads) and/or a nanomatrix (such as transACT) containing CD3 antibodies and CD28 antibodies, IL-2 at a concentration of 300-9000 IU/mL (for example, it can be 1000-9000 IU/mL, for example, it can be 6000 IU/mL), and STAT induction The STAT inhibitor (SSI) family member whose expression is reduced and/or activity is weakened (STAT-induced STAT inhibitor (SSI) family member can include SOCS1, for example, can be obtained by carrying a ribonucleoside formed with the Cas protein containing the gRNA of the present invention. The protein complex (RNP) is transduced so that the proportion of cells in the TIL encoding genes encoding STAT-induced STAT inhibitor (SSI) family members is about 95% or less), and after activating the TIL of the present invention for a certain period of time, radiation is added. According to PBMC (the ratio of TIL to PBMC is about 1:40-about 1:400), expand and culture for about 3-14 days. Cell processing systems can be used to collect cells in the culture medium, wash, freeze, and detect. The CD3 ratio of the final product can be greater than 80%, the cell viability rate can be greater than 50%, and the cells greater than 80% can be memory effector cells and effector cells. IFN-γ can be secreted after stimulation, and/or can be characterized by an increase in the proportion of activated cells.

CBLB Knockout 1. A method for culturing cells, the method comprising: reducing the expression and/or weakening the activity of CBL family members and/or functionally active fragments thereof of the cells.
[0477] 2. The method of embodiment 1, wherein the cells comprise immune cells.
[0478] 3. The method of embodiment 2, wherein the immune cells comprise phagocytes, lymphocytes, neutrophils, eosinophils and/or basophils.
[0479] 4. The method according to any one of embodiments 2-3, wherein the immune cells comprise monocytes, macrophages and/or dendritic cells.
[0480] 5. The method according to any one of embodiments 2-4, wherein the immune cells are derived from stem cell differentiated immune cells.
[0481] 6. The method of embodiment 5, wherein the stem cells comprise induced pluripotent stem cells (iPSCs).
[0482] 7. The method according to any one of embodiments 2-6, wherein the immune cells comprise B cells, T cells, natural killer cells and/or natural killer-like T cells (NKT).
[0483] 8. The method according to any one of embodiments 2-7, wherein the immune cells comprise αβ T cells and/or γδ T cells.
[0484] 9. The method of any one of embodiments 2-8, wherein the immune cells comprise tumor-infiltrating lymphocytes (TIL).
[0485] 10. The method of embodiment 9, wherein the TIL is a TIL derived from fragments of tumor tissue, pleural effusion and/or peritoneal effusion and/or TIL derived from resuscitation after cryopreservation.
[0486] 11. The method of embodiment 10, wherein the fragment has a volume from about 1 cubic millimeter to about 27 cubic millimeters.
[0487] 12. The method of any one of embodiments 2-11, wherein the immune cell comprises an engineered immune receptor displayed on the cell surface.
[0488] 13. The method of embodiment 12, wherein the engineered immune receptor specifically binds to an antigen expressed on a target cell.
[0489] 14. The method according to any one of embodiments 2-13, wherein the immune cell comprises chimeric antigen receptors and/or T cell receptors.
[0490] 15. The method of any one of embodiments 1-14, wherein reducing the expression and/or activity of a CBL family member of the cell comprises inhibiting the function of an E3 ubiquitin protein ligase.
[0491] 16. The method according to any one of embodiments 1-15, wherein the expression of the CBL family member is reduced and/or the activity is attenuated compared to cells in which the expression and/or activity of the CBL family member is unchanged. of cells showed improved cellular properties.
[0492] 17. The method of embodiment 16, wherein the improved cell characteristics comprise one or more selected from the group consisting of: improved cell proliferation capacity, increased proportion of viable cells, improved proportion of cell subpopulations, increased ability to secrete cytokines and improve the killing ability of tumor cells.
[0493] 18. The method of embodiment 17, wherein the improved proportion of cell subpopulations comprises one or more selected from the group consisting of: an increased proportion of activated cells, a reduced proportion of regulatory cells, a reduced proportion of exhausted cells. proportion, increased proportion of central memory cells and/or naive cells, decreased proportion of apoptotic cells and increased proportion of stem cell-like cells.
[0494] 19. The method of any one of embodiments 1-18, wherein the CBL family member comprises an SH3 domain.
[0495] 20. The method of any one of embodiments 1-19, wherein the CBL family member comprises CBLB.
[0496] 21. The method of any one of embodiments 1-20, wherein reducing the expression and/or the activity of a CBL family member of the cell comprises introducing a gene regulatory system into the cell.
[0497] 22. The method of embodiment 21, wherein the gene regulatory system is capable of disrupting the CBL family member at the DNA level.
[0498] 23. The method of any one of embodiments 21-22, wherein the gene regulatory system comprises a guide nucleic acid molecule and an enzymatic protein.
[0499] 24. The method of embodiment 23, wherein reducing the expression and/or weakening the activity of the CBL family member comprises: converting a ribonucleoprotein complex (RNP) comprising the guide nucleic acid molecule and the enzyme protein, an LNP comprising a gRNA and a Cas protein, or an LNP comprising a nucleic acid encoding a gRNA and a Cas protein, is introduced into the cell.
[0500] 25. The method of any one of embodiments 23-24, wherein the enzyme protein comprises a Cas protein, a Cas protein homolog, or a functionally active fragment thereof.
[0501] 26. The method of any one of embodiments 23-25, wherein the guide nucleic acid molecule comprises a guide RNA (gRNA).
[0502] 27. The method of any one of embodiments 23-26, wherein the guide nucleic acid molecule is capable of binding to a sequence of the CBL family member.
[0503] 28. The method according to any one of embodiments 23-27, wherein the guide nucleic acid molecule is capable of binding to a region selected from the group defined by the genomic coordinates shown in Table 1D, or a fragment thereof.
[0504] 29. The method of any one of embodiments 23-28, wherein the guide nucleic acid molecule is capable of binding to a region selected from the group consisting of: SEQ ID NOs: 520-590, 6177-7266, or fragments thereof.
[0505] 30. The method of any one of embodiments 23-29, wherein the guide nucleic acid molecule is capable of being about 15 to about 25 upstream of the 5′ end of a protospacer adjacent motif (PAM) selected from the group consisting of: Sequence combinations of nucleotides: AGG, TGG, CGG and GGG.
[0506] 31. The method of any one of embodiments 23-30, wherein the guide nucleic acid molecule comprises a targeting domain comprising SEQ ID NOs: 449-519, 5087-6176, 7376—The sequence shown in any one of 7413, 7414, and 7415.
[0507] 32. The method according to any one of embodiments 1-31, wherein the expression of the CBL family member is reduced and/or the activity is attenuated compared to cells in which the expression and/or activity of the CBL family member is unchanged. The proportion of cells expressing the product of the target gene among the cells decreases and/or the expression level of the target gene in a single cell decreases.
[0508] 33. The method according to any one of embodiments 1-32, wherein among the cells obtained by reducing the expression and/or weakening the activity of the CBL family member, the proportion of cells expressing the gene of interest is about 95% or lower.
[0509] 34. A cell obtained by the method of any one of embodiments 1-33.
[0510] 35. A composition comprising the cell of embodiment 34.
[0511] 36. A pharmaceutical composition comprising the cell of embodiment 34 and/or the composition of embodiment 35, and optionally a pharmaceutically acceptable carrier.
[0512] 37. A method of affecting cell growth, comprising administering the cell of embodiment 34, the composition of embodiment 35, and/or the pharmaceutical composition of embodiment 36.
[0513] 38. Use of the cell of embodiment 34, the composition of embodiment 35 and/or the pharmaceutical composition of embodiment 36 in the preparation of a medicament, wherein the medicament is used to prevent and/or treat diseases and/or symptoms.
[0514] 39. Use according to embodiment 38, wherein the disease and/or condition comprises a tumor.
[0515] 40. Use according to any one of embodiments 38-39, wherein the disease and/or condition comprises a solid tumor.
[0516] 41. Use according to any one of embodiments 38-40, wherein the disease and/or condition comprises one or more selected from the group consisting of: melanoma, ovarian cancer, cervical cancer, lung cancer, bladder cancer, breast cancer, head and neck cancer, pancreatic cancer, liver cancer, stomach cancer, colorectal cancer and kidney cancer.

[0517] The present invention provides methods for reducing the expression and/or weakening the activity of CBL family members and/or functionally active fragments thereof in said cells.

[0518] In one aspect, the present invention provides a method for culturing cells so that the expression and/or activity of CBL family members and/or functionally active fragments thereof is reduced in the cells. For example, the CBL family member may comprise an SH3 domain. For example, the CBL family member may include CBLB.

[0519] For example, the target gene of the present invention may be a gene encoding a CBL family member and/or a functionally active fragment thereof. For example, a cell obtained by reducing the expression and/or attenuating the activity of at least one target gene of the cell may exhibit improved cell properties compared to a cell in which the expression and/or activity of the target gene is unchanged. In one embodiment, the cells whose expression and/or activity of the target gene are unchanged may refer to cells derived from the same donor and which have not had the expression and/or activity of at least one target gene of the cells reduced. In one embodiment, cells whose expression and/or activity of the target gene are unchanged may refer to cells derived from the same donor and in which the expression and/or activity of other genes other than the target gene of the cells have not been altered (e.g., knocking out the other genes has basically no impact on cell function).

[0520] For example, the cells include immune cells. For example, the cells comprise immune effector cells. For example, the cells include immune effector T cells, immune effector NK cells, immune effector NKT cells. For example, the cells include phagocytes, lymphocytes, neutrophils, eosinophils and/or basophils.

[0521] For example, the cells include monocytes, macrophages, and/or dendritic cells.

[0522] For example, the cells of the present invention also include cells derived from differentiation of stem cells. For example, the cells of the present invention also include cells derived from differentiation of pluripotent stem cells. For example, the stem cells of the present invention can be obtained by induction. For example, the above-mentioned stem cells of the present invention may include induced pluripotent stem cells (iPSCs), embryonic stem cells, bone marrow stem cells, umbilical cord blood stem cells and/or peripheral blood stem cells.

[0523] For example, “stem cells” of the present invention also include pluripotent cells, multipotent cells, precursor cells and progenitor cells. For example, stem cells can be obtained from hematopoietic or mesenchymal stem cells obtained from bone marrow tissue, placental stem cells obtained from placental tissue, embryonic stem cells obtained from embryonic tissue, or embryonic germ cells obtained from the reproductive tissue of the fetus. Exemplary pluripotent stem cells can also be generated from somatic cells by reprogramming them to a pluripotent state through the expression of certain transcription factors associated with pluripotency; these cells are called “induced pluripotent stem cells” or “iPSCs”.

[0524] For example, the cells include B cells, T cells, natural killer cells and/or natural killer-like T cells (NKT). For example, “unmodified cells” or “unmodified cells” may refer to cells in which the genome has not been modified and does not contain a gene regulatory system or contains a control gene regulatory system (e.g., empty vector control, non-targeting gRNA, interfering siRNA, etc.) cells or cell populations. For example, the cells comprise αβ T cells and/or γδ T cells. For example, the cells include tumor-infiltrating lymphocytes (TILs). For example, the TIL is a TIL derived from tumor tissue, tumor-associated lymph nodes with or without tumor metastasis, tumor metastasis, fragments of paracancerous tissue, pleural effusion and/or peritoneal effusion and/or derived from frozen Save the TIL after recovery.

[0525] For example, the TIL of the present invention can be derived from tumor tissue, tumor-associated lymph nodes with or without tumor metastasis, tumor metastasis, fragments of paracancerous tissue, pleural effusion and/or TILs from peritoneal effusion and/or TILs derived from cryopreservation and resuscitation. For example, TILs of the present invention can be obtained by processing tumor tissue into tumor fragments. For example, the tumor fragments of the present invention have a volume of approximately 1 to 27 cubic millimeters. For example, the volume of the tumor fragments of the present invention is about 1 cubic millimeter, about 2 cubic millimeters, about 3 cubic millimeters, about 4 cubic millimeters, about 5 cubic millimeters, about 6 cubic millimeters, about 7 cubic millimeters, about 8 cubic millimeters, about 9 cubic millimeters, about 10 cubic millimeters, about 11 cubic millimeters, about 12 cubic millimeters, about 13 cubic millimeters, about 14 cubic millimeters, about 15 cubic millimeters, about 16 cubic millimeters, about 17 cubic millimeters, about 18 cubic millimeters, about 19 cubic millimeters, about 20 cubic millimeters, about 21 cubic millimeters, about 23 cubic millimeters, about 24 cubic millimeters, about 25 cubic millimeters, about 26 cubic millimeters or about 27 cubic millimeters.

[0526] For example, the cells comprise engineered immune receptors displayed on the cell surface. For example, the engineered immune receptor specifically binds to an antigen expressed on a target cell. For example, the cells comprise chimeric antigen receptors and/or T cell receptors.

[0527] In one aspect, the present invention provides a method for culturing tumor-infiltrating lymphocytes (TIL), which may include reducing the expression and/or activity of CBL family members and/or functionally active fragments thereof in the TIL.

[0528] For example, TILs derived from tumor tissue, pleural effusion and/or peritoneal effusion without in vitro amplification can be subjected to at least one stage of in vitro amplification, wherein in at least one stage of in vitro amplification, the expression and/or activity of CBL family members and/or functionally active fragments thereof are reduced in the TIL.

[0529] For example, the TILs of the present invention derived from tumor tissue, pleural effusion and/or peritoneal effusion without in vitro amplification can be subjected to the first stage of in vitro amplification and the second stage of in vitro amplification, and in the second stage of the in vitro amplification, the expression and/or activity of CBL family members and/or functionally active fragments thereof in the TIL can be reduced.

[0530] For example, the TILs of the present invention derived from tumor tissue, pleural effusion and/or peritoneal effusion without in vitro amplification can be subjected to the first stage of in vitro amplification and the second stage of in vitro amplification, and in the first stage of the in vitro amplification, the expression and/or activity of peptidase CBL family members and/or functionally active fragments thereof in the TIL can be reduced.

[0531] For example, the TILs of the present invention derived from tumor tissue, pleural effusion and/or peritoneal effusion without in vitro amplification can be subjected to the first stage of in vitro amplification and the second stage of in vitro amplification, and in the first stage of the in vitro amplification, the expression and/or activity of the CBL family members and/or functionally active fragments thereof in the TIL can be reduced, and in the second stage of the in vitro amplification, the expression and/or activity of CBL family members and/or functionally active fragments thereof in the TIL can be reduced

[0532] For example, the TILs of the present invention derived from tumor tissue, pleural effusion and/or peritoneal effusion without in vitro amplification can be subjected to a first-stage in vitro amplification, a second-stage in vitro amplification and a third-stage in vitro amplification, and in the first stage of in vitro amplification of the present invention, the expression and/or activity of CBL family members and/or functionally active fragments thereof in the TIL can be reduced.

[0533] For example, the TILs of the present invention derived from tumor tissue, pleural effusion and/or peritoneal effusion without in vitro amplification can be subjected to a first-stage in vitro amplification, a second-stage in vitro amplification and a third-stage in vitro amplification, and in the second stage of in vitro amplification of the present invention, the expression and/or activity of CBL family members and/or functionally active fragments thereof in the TIL can be reduced.

[0534] For example, the TILs of the present invention derived from tumor tissue, pleural effusion and/or peritoneal effusion without in vitro amplification can be subjected to a first-stage in vitro amplification, a second-stage in vitro amplification and a third-stage in vitro amplification, and in the third stage of in vitro amplification of the present invention, the expression and/or activity of CBL family members and/or functionally active fragments thereof in the TIL can be reduced.

[0535] For example, the TILs of the present invention derived from tumor tissue, pleural effusion and/or peritoneal effusion without in vitro amplification can be subjected to a first-stage in vitro amplification, a second-stage in vitro amplification and a third-stage in vitro amplification, and in the first stage of in vitro expansion of the present invention, the expression and/or activity of CBL family members and/or functionally active fragments thereof in the TIL can be reduced, and in the second stage of in vitro expansion of the present invention, the expression and/or activity of CBL family members and/or functionally active fragments thereof in the TIL can be reduced.

[0536] For example, the TILs of the present invention derived from tumor tissue, pleural effusion and/or peritoneal effusion without in vitro amplification can be subjected to a first-stage in vitro amplification, a second-stage in vitro amplification and a third-stage in vitro amplification, and in the first stage of in vitro expansion of the present invention, the expression and/or activity of CBL family members and/or functionally active fragments thereof in the TIL can be reduced, and in the third stage of in vitro expansion of the present invention, the expression and/or activity of CBL family members and/or functionally active fragments thereof in the TIL can be reduced.

[0537] For example, the TILs of the present invention derived from tumor tissue, pleural effusion and/or peritoneal effusion without in vitro amplification can be subjected to a first-stage in vitro amplification, a second-stage in vitro amplification and a third-stage in vitro amplification, and in the second stage of in vitro expansion of the present invention, the expression and/or activity of CBL family members and/or functionally active fragments thereof in the TIL can be reduced, and in the third stage of in vitro expansion of the present invention, the expression and/or activity of CBL family members and/or functionally active fragments thereof in the TIL can be reduced.

[0538] For example, the TILs of the present invention derived from tumor tissue, pleural effusion and/or peritoneal effusion without in vitro amplification can be subjected to a first-stage in vitro amplification, a second-stage in vitro amplification and a third-stage in vitro amplification, and in the first stage of in vitro expansion of the present invention, the expression and/or activity of CBL family members and/or functionally active fragments thereof in the TIL can be reduced, in the second stage of in vitro expansion of the present invention, the expression and/or activity of CBL family members and/or functionally active fragments thereof in the TIL can be reduced, and in the third stage of in vitro amplification of the present invention, the expression and/or activity of CBL family members and/or functionally active fragments thereof in the TIL can be reduced.

[0539] For example, cells obtained by reducing the expression and/or attenuating the activity of a CBL family member exhibit improved cellular properties compared to cells in which the expression and/or activity of the CBL family member is unchanged.

[0540] For example, the improved cell number of the present invention refers to reducing the expression and/or activity of the CBL family member in at least one in vitro expansion stage compared to cells in which the expression and/or activity of the CBL family member is unchanged. The cell number of the cells of the invention can be increased by at least about 1 time, at least about 2 times, at least about 3 times, at least about 4 times, at least about 5 times, at least about 6 times, at least about 7 times, at least about 8 times, at least About 9 times, at least about 10 times, at least about 11 times, at least about 12 times, at least about 13 times, at least about 14 times, at least about 15 times, at least about 20 times, at least about 30 times, at least about 40 times, or At least about 50 times.

[0541] For example, an increased proportion of viable cells can manifest itself as an increase in cell viability. For example, the increased proportion of viable cells of the present invention may refer to reducing the expression and/or activity of the CBL family member in at least one in vitro expansion stage compared to cells in which the expression and/or activity of the CBL family member is unchanged. The proportion of viable cells of the cells of the invention with reduced activity can be increased by at least about 100%, at least about 90%, at least about 80%, at least about 70%, at least about 60%, at least about 50%, at least about 40%, at least about 30%, at least about 20%, at least about 19%, at least about 18%, at least about 17%, at least about 16%, at least about 15%, at least about 14%, at least about 13%, at least about 12%, at least about 11%, at least about 10%, at least about 9%, at least about 8%, at least about 7%, at least about 6%, at least about 5%, at least about 4%, at least about 3%, at least about 2%, at least about 1%, at least about 0.5%, at least about 0.4%, at least about 0.3%, at least about 0.2%, or at least about 0.1%.

[0542] For example, the increased cytokine secretion ability of the present invention may refer to an increase in the cytokine secretion ability of a cell selected from the group consisting of: IL-2, IL-6, CD107a, GZMB, TNF-α, and IFN-γ. For example, the improved cytokine secretion ability of the present invention may refer to reducing the expression and/or activity of the CBL family member in at least one in vitro expansion stage compared with cells in which the expression and/or activity of the CBL family member is unchanged. Or the proportion of cells secreting cytokines in the cells of the present invention with weakened activity can be increased by at least about 1 time, at least about 2 times, at least about 3 times, at least about 4 times, at least about 5 times, at least about 6 times, at least about 7 times, at least about 8 times, at least about 9 times, at least about 10 times, at least about 11 times, at least about 12 times, at least about 13 times, at least about 14 times, at least about 15 times, at least about 20 times, at least about 30 times, at least about 40 times, or at least about 50 times. For example, the enhanced cytokine secretion of the present invention

[0543] Ability may refer to secretory cells in cells of the invention that have reduced expression and/or attenuated activity of said CBL family member during at least one stage of in vitro expansion compared to cells in which the expression and/or activity of the CBL family member is unchanged. The cellular proportion of the factor can be increased by at least about 100%, at least about 90%, at least about 80%, at least about 70%, at least about 60%, at least about 50%, at least about 40%, at least about 30%, at least about 20%, at least about 19%, at least about 18%, at least about 17%, at least about 16%, at least about 15%, at least about 14%, at least about 13%, at least about 12%, at least about 11%, at least about 10%, at least about 9%, at least about 8%, at least about 7%, at least about 6%, at least about 5%, at least about 4%, at least about 3%, at least about 2%, at least about 1%, at least about 0.5%, at least about 0.4%, at least about 0.3%, at least about 0.2%, or at least about 0.1%.

[0544] For example, the improved tumor cell killing ability of the present invention may refer to reducing the expression and/or activity of the CBL family member in at least one in vitro expansion stage compared with cells in which the expression and/or activity of the CBL family member is unchanged. Or the tumor cell killing rate of the cells of the present invention with weakened activity can be increased by at least about 1 time, at least about 2 times, at least about 3 times, at least about 4 times, at least about 5 times, at least about 6 times, at least about 7 times, at least About 8 times, at least about 9 times, at least about 10 times, at least about 11 times, at least about 12 times, at least about 13 times, at least about 14 times, at least about 15 times, at least about 20 times, at least about 30 times, at least About 40 times, or at least about 50 times. For example, the improved tumor cell killing ability of the present invention may refer to reducing the expression and/or activity of the CBL family member in at least one in vitro expansion stage compared with cells in which the expression and/or activity of the CBL family member is unchanged. Or the tumor cell killing rate of the cells of the present invention with weakened activity can be increased by at least about 100%, at least about 90%, at least about 80%, at least about 70%, at least about 60%, at least about 50%, at least about 40%, at least About 30%, at least about 20%, at least about 19%, at least about 18%, at least about 17%, at least about 16%, at least about 15%, at least about 14%, at least about 13%, at least about 12%, at least About 11%, at least about 10%, at least about 9%, at least about 8%, at least about 7%, at least about 6%, at least about 5%, at least about 4%, at least about 3%, at least about 2%, at least About 1%, at least about 0.5%, at least about 0.4%, at least about 0.3%, at least about 0.2%, or at least about 0.1%. For example, the tumor cell killing rate of the cells of the present invention can be measured by the IncuCyte system or CFSE and DAPI staining methods. For example, the improved tumor cell killing ability may refer to the ability of cells to kill solid tumor cells.

[0545] For example, the improved cell subpopulation ratio of the present invention may comprise one or more selected from the following group: increased CD8⁺ Cell proportion, increased central memory cell and/or naive cell proportion, decreased regulatory cell proportion, increased activated cell proportion, increased tumor-specific cell proportion, and stem cell-like cell proportion increased.

[0546] For example, the proportion of CD8⁺ cells, central memory cells and/or immature cells, activated cells, tumor-specific cells and/or stem cell-like cells can be increased by at least about 100%, at least about 90%, at least about 80%, at least about 70%, at least about 60%, at least about 50%, at least about 40%, At least about 30%, at least about 20%, at least about 19%, at least about 18%, at least about 17%, at least about 16%, at least about 15%, at least about 14%, at least about 13%, at least about 12%, At least about 11%, at least about 10%, at least about 9%, at least about 8%, at least about 7%, at least about 6%, at least about 5%, at least about 4%, at least about 3%, at least about 2%, At least about 1%, at least about 0.5%, at least about 0.4%, at least about 0.3%, at least about 0.2%, or at least about 0.1%.

[0547] For example, the reduced proportion of exhausted cells of the present invention can be increase of PD-1⁺, LAG-3⁺, TIM-3⁺, and/or CD39⁺ cell proportion. For example, the reduced proportion of regulatory cells of the present invention can be reduction of CD4⁺ CD25⁺ Foxp3⁺ cell proportion. For example, the reduced proportion of apoptotic cells of the present invention can be reduction of CD95⁺ caspass3⁺ and/or CD95⁺ DR5⁺ cell proportion.

[0548] For example, the proportion of exhausted cells, regulatory cells and/or apoptotic cells in the cells can be reduced by at least about 100%, at least about 90%, at least about 80%, at least about 70%, at least about 60%, at least about 50%, At least about 40%, at least about 30%, at least about 20%, at least about 19%, at least about 18%, at least about 17%, at least about 16%, at least about 15%, at least about 14%, at least about 13%, at least about 12%, at least about 11%, at least about 10%, at least about 9%, at least about 8%, at least about 7%, at least about 6%, at least about 5%, at least about 4%, at least about 3%, at least about 2%, at least about 1%, at least about 0.5%, at least about 0.4%, at least about 0.3%, at least about 0.2%, or at least about 0.1%, or can be reduced by at least about 1 times, at least about 2 times, at least about 3 times, at least about 4 times, at least about 5 times, at least about 6 times, at least about 7 times, at least about 8 times, at least about 9 times, at least about 10 times, at least about 11 times, at least about 12 times, at least about 13 times, at least about 14 times, at least about 15 times, at least about 20 times, at least about 30 times, at least about 40 times, or at least about 50 times.

[0549] For example, the culture method of the present invention may include a gene editing step for cells. For example, it includes subjecting the cells to at least one stage of in vitro expansion, wherein in at least one stage of the in vitro expansion, a gene regulatory system can be introduced into the cells.

[0550] For example, the gene regulatory system can destroy the target gene at the DNA level. For example, the gene regulatory system can disrupt a region of the target gene or a fragment thereof in the genome of the cell. For example, after using the gene regulation system, the DNA region or fragment thereof where the target gene is located in the cell is sheared, and the expression ability of the target gene is reduced or the activity of the target gene is inhibited. For example, the editing effect of the gene regulation system on the target gene can be long-term and sustained. The genomic region of the present invention is determined based on the hg38 version of the human reference genome.

[0551] For example, the gene regulatory system may include guide nucleic acid molecules and enzymatic proteins. For example, the enzyme protein can have nucleic acid shearing enzyme activity, and the guide nucleic acid molecule can guide the enzyme protein to specifically cut the region where the target gene is located or its fragments. For example, the guide nucleic acid molecule and the enzyme protein may exist in the form of a ribonucleoprotein complex (RNP), or each may exist independently. For example, the enzyme protein may comprise Cas protein. For example, polynucleotides encoding gRNA and Cas protein can be introduced into the target cell, or each independently.

[0552] For example, reducing the expression and/or weakening the activity of at least one target gene of a cell according to the present invention may include: introducing a ribonucleoprotein complex (RNP) containing the guide nucleic acid molecule and the enzyme protein into the cell. For example, the enzyme protein may comprise Cas protein, Cas protein homologues, or functionally active fragments thereof. For example, the guide nucleic acid molecule may comprise guide RNA (gRNA). For example, the guide nucleic acid molecule may comprise guide RNA (gRNA). For example, a complex comprising a polynucleotide encoding a gRNA and a Cas protein can be introduced into the cell. For example, a complex containing gRNA and Cas protein can be introduced into the cell.

[0553] For example, the gRNA can be used to bind to the sequence of the target gene. For example, the binding of the gRNA to the sequence of the target gene can be completely complementary, partially complementary, or can hybridize to the sequence of the target gene under moderately stringent or stringent conditions. For example, the binding of the gRNA to the sequence of the target gene can cause the CRISPR system of the gRNA to specifically cleave the target gene.

[0554] For example, the editing target region of the present invention may be a region before the promoter. For example, the editing target region of the present invention may be a region with high transcription factor binding capacity. For example, the editing target region of the present invention may be a region with a specific number of transcription factor binding numbers. For example, the editing target region of the present invention can be a continuous region with a binding number of about 3 or more transcription factors.

[0555] For example, when the gene editing system includes CRISPR/Cas9, there may be a protospacer adjacent motif (PAM) downstream of the region targeted by the guiding nucleic acid molecule of the present invention, and the protospacer adjacent motif (PAM) may be AGG, TGG, GGG or CGG. For example, when the PAM region of the target gene is determined, those skilled in the art can easily determine about 15 to about 25 (for example, about 15, about 16, about 17, about 18, about 19, about 20) upstream of the 5′ end of the PAM of the target gene, about 21, about 22, about 23, about 24, about 25) nucleotides, and a suitable gRNA can be designed for the target sequence. For example, the guide nucleic acid molecule is capable of binding to a sequence consisting of about 15 to about 25 nucleotides upstream of the 5′ end of a protospacer adjacent motif (PAM) selected from the group consisting of: AGG, TGG, GGG, and CGG.

[0556] For example, when the gene editing system includes CRISPR/Cas12, there may be a protospacer adjacent motif (PAM) upstream of the region targeted by the guiding nucleic acid molecule of the present invention, and the protospacer adjacent motif (PAM) may be NTTN, TTYN, VTTV, TRTV, TTTV, TATV, TYCV, TNN, or NTN, where Nis A, T, C, or G, Y is T or C, V is A, C, or G, and R is A or G. For example, when the PAM region of the target gene is determined, those skilled in the art can easily determine about 15 to about 25 (for example, about 15, about 16, about 17, about 18, about 19, about 20) downstream of the 3′ end of the PAM of the target gene, about 21, about 22, about 23, about 24, about 25) nucleotides, and a suitable gRNA can be designed for the target sequence. For example, the guide nucleic acid molecule can bind to a sequence consisting of about 15 to about 25 nucleotides downstream of the 3′ end of the protospacer adjacent motif (PAM) selected from the group consisting of: NTTN, TTYN, VTTV, TRTV, TTTV, TATV, TYCV, TNN, or NTN, where Nis A, T, C, or G, Y is T or C, Vis A, C, or G, and R is A or G.

[0557] For example, when the gene editing system of the present invention includes wild-type Cas12a (also known as Cpf1, such as AsCas12a, FnCas12a, LbCas12a, BbCas12a, CMaCas12a and OsCas12a), the upstream region of the guiding nucleic acid molecule targeting of the present invention can be selected from the following PAM sequence: NTTN, where N can be A, T, C or G. For example, when the PAM region of the target gene is determined, those skilled in the art can easily determine about 17 to about 25 (for example, about 17, about 18, about 19, about 20, about 21, about 22) downstream of the 3′ end of the PAM of the target gene, about 23, about 24, or about 25) nucleotides, and a suitable gRNA can be designed for the target sequence.

[0558] For example, when the gene editing system of the present invention includes mutant Cas12a, such as enAsCas12a (mutation sites E174R, S542R and K548R), the upstream of the region targeted by the guiding nucleic acid molecule of the present invention can have a PAM sequence selected from the following: TTYN (TTTN/TTCN), VTTV (ATTV/CTTV/GTTV), or TRTV (TATV/TGTV), where N can be A, T, C or G, Y can be T or C, V can be A, C or G, R Can be A or G. For example, when the PAM region of the target gene is determined, those skilled in the art can easily determine about 17 to about 25 (for example, about 17, about 18, about 19, about 20, about 21, about 22) downstream of the 3′ end of the PAM of the target gene, about 23, about 24, or about 25) nucleotides, and a suitable gRNA can be designed for the target sequence.

[0559] For example, when the gene editing system of the present invention includes mutant Cas12a, such as opAsCas12a (mutation sites: E174R and S542R), the upstream of the region targeted by the guiding nucleic acid molecule of the present invention can have a PAM sequence selected from the following: TTTV (TTTA, TTTC, or TTTG), where V can be A, C, or G. For example, when the PAM region of the target gene is determined, those skilled in the art can easily determine about 17 to about 25 (for example, about 17, about 18, about 19, about 20, about 21, about 22) downstream of the 3′ end of the PAM of the target gene, about 23, about 24, or about 25) nucleotides, and a suitable gRNA can be designed for the target sequence.

[0560] For example, when the gene editing system of the present invention includes mutant Cas12a, such as AsCas12a Ultra (mutation sites: M537R and F870L), the upstream of the region targeted by the guiding nucleic acid molecule of the present invention can have a PAM sequence selected from the following: TTTV, TATV, Or TYCV, where V can be A, C or G and Y can be T or C. For example, when the PAM region of the target gene is determined, those skilled in the art can easily determine about 17 to about 25 (for example, about 17, about 18, about 19, about 20, about 21, about 22) downstream of the 3′ end of the PAM of the target gene, about 23, about 24, or about 25) nucleotides, and a suitable gRNA can be designed for the target sequence.

[0561] For example, when the gene editing system of the present invention includes mutant Cas12a, such as hfCas12Max (mutation site: N243R/E336R/D892R) and Cas12Max (mutation site: N243R), the upstream region of the guiding nucleic acid molecule targeting of the present invention can be A PAM sequence selected from: TNN, or NTN, where N can be A, T, C, or G. For example, when the PAM region of the target gene is determined, those skilled in the art can easily determine about 17 to about 25 (for example, about 17, about 18, about 19, about 20, about 21, about 22) downstream of the 3′ end of the PAM of the target gene, about 23, about 24, or about 25) nucleotides, and a suitable gRNA can be designed for the target sequence.

[0562] For example, the guide nucleic acid molecule may comprise about 10 to about 30 nucleotides before the PAM region represented by AGG, TGG, GGG and/or CGG in the DNA where the gene encoding the CBL family member and/or its functionally active fragment is located. composed of target sequences. For example, the guidance

[0563] The nucleic acid molecule may include about 15 to about 25, about 17 to about 25, and about 17 to about 25 before the PAM region represented by AGG, TGG, GGG and/or CGG in the DNA where the gene encoding the CBL family member and/or its functionally active fragment is located. About 19 to about 25, about 20 to about 25, about 21 to about 25, about 23 to about 25, about 15 to about 23, about 17 to about 23, about 19 to about 23, about 20 to about 23, about 21 to about 23, about 15 to about 21, about 17 to about 21, about 19 to about 21, about 20 to about 21, about 15 to about 20, about 17 to a target sequence consisting of about 20, about 19 to about 21, about 15 to about 19, about 17 to about 19, or about 15 to about 17 nucleotides.

[0564] For example, the target sequence may be selected from the region defined by the genomic coordinates shown in Table 1D or a fragment thereof. For example, the target sequence of the present invention can be the PTB structural and functional domain of CBLB. For example, the target sequence of the present invention can be the zinc finger structural domain of CBLB. For example, the target sequence of the present invention can be the UBA structural and functional domain of CBLB. For example, the target sequences of the present invention can be chr3:105658893-105659215, chr3:105720184-105720231, chr3:105720234-105720278, chr3:105720300-105720327, chr3:105720333-105720375, chr3:105723918-105723956, chr3:105724025-105724052, chr3:105724100-105724131, chr3:105724134-105724219, chr3:105724232-105724310, chr3:105733918-105733970, chr3:105733988-105734073, chr3:105734082-105734109, chr3:105737162-105737268, chr3:105740404-105740449, chr3:105740470-105740551, chr3:105740563-105740646, chr3:105740707-105740734, chr3:105745796-105745885, chr3:105745896-105745947, chr3:105745963-105746060, chr3:105749514-105749557, chr3:105749570-105749653, chr3:105749657-105749701, chr3:105749751-105749827, chr3:105749860-105749909, chr3:105751528-105751641, chr3:105751674-105751705, chr3:105754228-105754312, chr3:105754319-105754376, chr3:105754386-105754419, chr3:105754544-105754599, chr3:105776307-105776394, chr3:105776402-105776557, chr3:105776632-105776662, chr3:105824008-105824362, chr3:105839348-105839393, chr3:105839418-105839485, chr3:105839533-105839704, chr3:105853309-105853347, chr3:105853445-105853472, chr3:105853571-105853598, chr3:105867293-105867352, chr3:105867358-105867389.

[0565] For example, the guide nucleic acid molecule can include a targeting domain that is complementary to a target sequence selected from the group consisting of: SEQ ID NOs: 520-590, 6177-7266.

[0566] For example, the guide nucleic acid molecule can include a targeting domain, which can include sequences as set forth in SEQ ID NOs: 449-519, 5087-6176, 7376-7413, 7414, 7415.

[0567] For example, the guide nucleic acid molecule can include a targeting domain, which can include sequences as set forth in SEQ ID NOs: 7376-7413, 7414, 7415.

[0568] For example, the ratio of cells expressing the product of the gene of interest in cells obtained by reducing the expression and/or activity of at least one target gene of the cell compared to cells in which the expression and/or activity of the target gene is unchanged. can be reduced and/or the expression level of the target gene in a single cell can be reduced.

[0569] For example, in the method of the present invention, the target gene is expressed in cells obtained by reducing the expression and/or activity of at least one target gene in the cells compared with cells in which the expression and/or activity of the target gene is unchanged. The cell proportion of the product is reduced by at least about 5%. For example, the proportion of cells expressing the product of the gene encoding a CBL family member and/or a functionally active fragment thereof is reduced by at least about 100%, at least about 90%, at least about 80%, at least about 70%, at least about 60%, at least About 50%, at least about 40%, at least about 30%, at least about 20%, at least about 19%, at least about 18%, at least about 17%, at least about 16%, at least about 15%, at least about 14%, at least About 13%, at least about 12%, at least about 11%, at least about 10%, at least about 9%, at least about 8%, at least about 7%, at least about 6%, or at least about 5%. For example, the proportion of cells expressing the product of the gene encoding a CBL family member and/or a functionally active fragment thereof can range from an observable proportion of cells to 0%. For example, the proportion of cells expressing the product of the gene encoding a CBL family member and/or a functionally active fragment thereof can be reduced to at least about 100%, at least about 90%, at least about 80%, at least about 70%, at least about 60%, at least about 50%, at least about 40%, at least about 30%, at least about 20%, at least about 19%, at least about 18%, at least about 17%, at least about 16%, at least about 15%, at least about 14%, at least about 13%, at least about 12%, at least about 11%, at least about 10%, at least about 9%, at least about 8%, at least about 7%, at least about 6%, at least about 5%, or at least about 1%. For example, the proportion of cells expressing the product of the gene encoding a CBL family member and/or a functionally active fragment thereof can be detected by cell flow cytometry.

[0570] For example, the proportion of cells expressing the product of the gene encoding the CBL family member and/or its functionally active fragment among the cells obtained by reducing the expression and/or weakening the activity of at least one target gene of the cells in the method of the present invention can be is at most about 95%. For example, the proportion of cells expressing the product of the gene encoding a CBL family member and/or a functionally active fragment thereof may be at most about 95%, at most about 90%, at most about 80%, at most about 70%, at most about 60%, up to about 50%, up to about 40%, up to about 30%, up to about 20%, up to about 19%, up to about 18%, up to about 17%, up to about 16%, up to about 15%, up to about 14%, up to about 13%, up to about 12%, up to about 11%, up to about 10%, up to about 9%, up to about 8%, up to about 7%, up to about 6%, or up to about 5%. For example, the proportion of cells expressing the product of the gene encoding a CBL family member and/or a functionally active fragment thereof can be detected by cell flow cytometry.

[0571] For example, in the method of the present invention, compared with cells in which the expression and/or activity of the target gene are unchanged, the cells obtained by reducing the expression and/or activity of at least one target gene are described in a single cell. The expression level of the target gene can be reduced by at least about 5%. For example, the expression level of the gene of interest in a single cell can be reduced by at least about 100%, at least about 90%, at least about 80%, at least about 70%, at least about 60%, at least about 50%, at least about 40%, at least About 30%, at least about 20%, at least about 19%, at least about 18%, at least about 17%, at least about 16%, at least about 15%, at least about 14%, at least about 13%, to about 12% less, at least about 11%, at least about 10%, at least about 9%, at least about 8%, at least about 7%, at least about 6%, or at least about 5%. For example, the expression level of the target gene in a single cell can range from an observable amount to 0%. For example, the expression level of the gene of interest in a single cell can be reduced to at least about 100%, at least about 90%, at least about 80%, at least about 70%, at least about 60%, at least about 50%, at least about 40%, at least about 30%, at least about 20%, at least about 19%, at least about 18%, at least about 17%, at least about 16%, at least about 15%, at least about 14%, at least about 13%, at least about 12%, at least about 11%, at least about 10%, at least about 9%, at least about 8%, at least about 7%, at least about 6%, at least about 5%, or at least about 1%.

[0572] For example, in the method of the present invention, the expression amount of the target gene in a single cell in the cells obtained by reducing the expression and/or activity of at least one target gene can be the expression and/or activity of the target gene. At most about 95% of the cells are unchanged. For example, the expression level of the gene encoding the CBL family member and/or the functionally active fragment thereof (e.g., the gene encoding CBLB) in a single cell in the cell may be the expression and/or the expression of the gene encoding the CBL family member and/or the functionally active fragment thereof, or up to about 95%, up to about 90%, up to about 80%, up to about 70%, up to about 60%, up to about 50%, up to about 40%, up to about 30%, up to about 20% of the cells with unchanged activity %, up to about 19%, up to about 18%, up to about 17%, up to about 16%, up to about 15%, up to about 14%, up to about 13%, up to about 12%, up to about 11%, up to about 10%, up to about 9%, up to about 8%, up to about 7%, up to about 6%, or up to about 5%.

[0573] For example, the methods of the invention comprise: subjecting the cells to at least one stage of in vitro expansion, wherein the expression and/or activity of the CBL family members of the cells is reduced during at least one stage of the in vitro expansion.

[0574] For example, the TILs derived from tumor tissue, tumor-related lymph nodes with or without tumor metastasis, tumor metastasis lesions, fragments of para-cancerous tissue, pleural effusion and/or peritoneal effusion and have not been amplified in vitro are subjected to the first stage of in vitro amplification and the second stage of in vitro amplification, and in the second stage of in vitro amplification, the expression and/or activity of family members CBL is reduced.

[0575] For example, the first stage of in vitro expansion is performed for at least about 7 days. For example, the second stage of in vitro expansion is performed for at least about 7 days.

[0576] For example, the cells may be contacted with the one or more cellular activators and the cells may comprise expression of CBL family members and/or functionally active fragments thereof in a single stage of in vitro expansion of the invention, and/or reduced activity. For example, the cell activator may comprise an agonist for one or more targets selected from the group consisting of: CD3, CD28, HVEM, CD40L, OX40, and 4-1BB. For example, in a single stage of said in vitro expansion, cells of the invention are exposed to reduced expression and/or attenuated activity of CBL family members and to one or more cell activators of the invention. For example, in the first stage of in vitro expansion of the present invention, the expression and/or activity of the TIL of the present invention and the CBL family member of the present invention can be reduced and contacted with one or more cell activators of the present invention. For example, in the second stage of in vitro expansion of the present invention, the expression and/or activity of the CBL family members of the TIL of the present invention can be reduced and contacted with one or more cell activators of the present invention. For example, in the third stage of in vitro expansion of the present invention, the expression and/or activity of the CBL family members of the TIL of the present invention can be reduced and contacted with one or more cell activators of the present invention.

[0577] For example, in a single stage of in vitro expansion of the invention, cells of the invention can be exposed to substantially simultaneously reduced expression and/or activity of CBL family members and one or more cell activators of the invention. For example, in a single stage of in vitro expansion of the present invention, the cells of the present invention can be made to reduce the expression and/or activity of CBL family members first, for example, 2 hours in advance, 4 hours in advance, 8 hours in advance, or 8 hours in advance. 12 hours, 24 hours in advance, or 48 hours in advance, etc., and then contacted with one or more cell activators of the present invention. For example, in a single stage of in vitro expansion of the present invention, the cells of the present invention can be contacted with one or more cell activators of the present invention first, for example, 2 hours in advance, 4 hours in advance, 8 hours in advance, 12 hours in advance, 24 hours in advance, or 48 hours in advance, etc., to reduce the expression and/or activity of CBL family members.

[0578] For example, in the first stage of in vitro expansion of the invention, the TIL of the invention can substantially simultaneously reduce the expression and/or activity of CBL family members and contact one or more cell activators of the invention. For example, in the second stage of in vitro expansion of the invention, the TIL of the invention can substantially simultaneously reduce the expression and/or activity of CBL family members and contact one or more cell activators of the invention. For example, in the third stage of in vitro expansion of the invention, the TIL of the invention can substantially simultaneously reduce the expression and/or activity of CBL family members and contact one or more cell activators of the invention.

[0579] In another aspect, the invention provides a method for culturing tumor infiltrating lymphocytes (TIL), which may comprise: (A) making cells derived from tumor tissue, pleural effusion and/or peritoneal effusion without in vitro expansion. The first TIL population is contacted with one or more cell growth factors; wherein the second TIL population is obtained through the step (A); (B) the expression and/or activity of CBL family members of the second TIL population is reduced weaken; wherein, the third TIL group is obtained through the step (B).

[0580] In one embodiment, the first stage in vitro amplification of the present invention can be used interchangeably with step (A) in the method of the above aspect. In the one embodiment, the second stage in vitro amplification of the present invention can be used interchangeably with step (B) in the method of the above aspect. In one embodiment, the TILs expanded in vitro in the first stage of the present invention can be used interchangeably with the second TIL population obtained in step (A) of the above method. In one embodiment, the TILs expanded in vitro in the second stage of the present invention can be used interchangeably with the third TIL population obtained in step (B) of the above method. In one embodiment, if necessary, the third stage in vitro amplification of the present invention can be used interchangeably with any additional step (C) in the method of the above aspect. In one embodiment, if necessary, the third-stage in vitro expanded TIL of the present invention can be used arbitrarily interchangeably with the fourth TIL group obtained by any additional step (C) in the above method.

[0581] In another aspect, the present invention provides a method for culturing tumor infiltrating lymphocytes (TIL), which may include: (A) culturing cells derived from tumor tissue, pleural effusion and/or peritoneal effusion without in vitro amplification The first TIL population is contacted with a variety of cell growth factors; wherein, the second TIL population is obtained through the step (A); (B) the second TIL population can be contacted with a variety of cell growth factors, and with a variety of cell growth factors, and the cell activator is contacted to reduce the expression and/or activity of CBL family members, and the TILs are co-cultured with feeder cells; wherein, the third TIL population is obtained through the step (B).

[0582] In another aspect, the present invention provides a method for culturing tumor infiltrating lymphocytes (TIL), which may include: (A) culturing cells derived from tumor tissue, pleural effusion and/or peritoneal effusion without in vitro amplification The first TIL population is contacted with cell growth factors; wherein, the second TIL population is obtained through the step (A); (B) the second TIL population can be contacted with cell growth factors, with cell activators, and the expression and/or activity of CBL family members is reduced and the TILs are co-cultured with feeder cells. The CBL family members may include CBLB; wherein the third TIL population is obtained through the step (B).

[0583] In another aspect, the invention provides a method of culturing tumor-infiltrating lymphocytes (TIL). The method of obtaining TIL cells from subject tissue samples can be to obtain orthotopic tumor samples or metastatic tumor samples from the patient during surgery, and the weight can be at least about 1 g, or multiple pieces of tissue can be merged. Tumor tissue, pleural effusion and/or peritoneal effusion are transported in a sample transport fluid, such as a commercially available tumor tissue transport fluid, tumor tissue preservation fluid or tumor tissue transfer fluid, shipped at about 2-8 degrees Celsius, and processed within 48 hours. The tissue pieces can be mechanically broken to a size of about 1-27 cubic millimeters per piece, transferred into a breathable culture bag or Grex, and added with cell serum-free medium and a concentration of 300-9000 IU/mL (for example, it can be 1000-9000 IU/mL, for example It can be cultured with IL-2 (6000 IU/mL) for about 3-14 days. Collect the cells in the culture medium and transfer them to a breathable culture bag, or Grex, or Xuri equipment. The cell serum-free culture medium can be added with the CD28 antibody, CD3 antibody and CD28 antibody of the present invention, and magnetic beads containing CD3 antibody and CD28 antibody (such as Dynabeads) and/or a nanomatrix (such as transACT) containing CD3 antibodies and CD28 antibodies, IL-2 at a concentration of 300-9000 IU/mL (for example, it can be 1000-9000 IU/mL, for example, it can be 6000 IU/mL), and a CBL family The expression and/or activity of members is reduced (CBL family members may include CBLB, for example, by carrying a ribonucleoprotein complex (RNP) formed by the gRNA of the present invention and Cas protein.

[0584] The TIL is transduced so that the proportion of cells encoding genes encoding CBL family members is about 95% or less), and after activating the TIL of the present invention for a certain period of time, irradiated PBMC are added (TIL to PBMC at a ratio of about 1:40 to about 1:400), amplification culture takes about 3-14 days. Cell processing systems can be used to collect cells in the culture medium, wash, freeze, and detect. The CD3 ratio of the final product can be greater than 80%, the cell viability rate can be greater than 50%, and the cells greater than 80% can be memory effector cells and effector cells. IFN-γ can be secreted after stimulation, and/or can be characterized by an increase in the proportion of activated cells.

### Target Combination Knockout

[0585] 1. A method of culturing cells, the method comprising: causing the reduction of expression and/or activity of at least two family members selected from the group consisting of the peptidase C64 family, the ZC3H12 family, the STAT-induced STAT inhibitor (SSI) family, and the CBL family, or their functional fragments.
[0586] 2. The method of embodiment 1, wherein the cells comprise immune cells.
[0587] 3. The method of embodiment 2, wherein the immune cells comprise phagocytes, lymphocytes, neutrophils, eosinophils and/or basophils.
[0588] 4. The method according to any one of embodiments 2-3, wherein the immune cells comprise monocytes, macrophages and/or dendritic cells.
[0589] 5. The method according to any one of embodiments 2-4, wherein the immune cells are derived from stem cell differentiated immune cells.
[0590] 6. The method of embodiment 5, wherein the stem cells comprise induced pluripotent stem cells (iPSCs), embryonic stem cells, bone marrow stem cells, umbilical cord blood stem cells and/or peripheral blood stem cells.
[0591] 7. The method according to any one of embodiments 2-6, wherein the immune cells comprise Contains B cells, T cells, natural killer cells and/or natural killer-like T cells (NKT).
[0592] 8. The method according to any one of embodiments 2-7, wherein the immune cells comprise αβ T cells and/or γδ T cells.
[0593] 9. The method of any one of embodiments 2-8, wherein the immune cells comprise tumor-infiltrating lymphocytes (TIL).
[0594] 10. The method of embodiment 9, wherein the TIL is derived from tumor tissue, tumor-associated lymph nodes with or without tumor metastasis, tumor metastasis, fragments of paracancerous tissue, pleural effusion and/or peritoneal cavity. TIL from effusion and/or from TIL recovered after cryopreservation.
[0595] 11. The method of embodiment 10, wherein the fragment has a volume from about 1 cubic millimeter to about 27 cubic millimeters.
[0596] 12. The method of any one of embodiments 2-11, wherein the immune cell comprises an engineered immune receptor displayed on the cell surface.
[0597] 13. The method of embodiment 12, wherein the engineered immune receptor specifically binds to an antigen expressed on a target cell.
[0598] 14. The method of any one of embodiments 2-13, wherein the immune cell comprises a chimeric antigen receptor and/or a T cell receptor.
[0599] 15. The method according to any one of embodiments 1-14, wherein said causing the cell to have at least 2 members selected from the group consisting of the peptidase C64 family, the ZC3H12 family, the STAT-inducing STAT inhibitor (SSI) family, and the CBL family. The reduced expression and/or weakened activity of a family member and/or its functionally active fragment includes at least 2 effects selected from the following group: inhibiting the function of deubiquitinating enzymes and/or zinc finger nucleases, inhibiting the function of nucleases, inhibiting the negative regulation of cytokine signaling and inhibiting E3 ubiquitin protein ligase.
[0600] 16. The method according to any one of embodiments 1-15, wherein at least 2 family members selected from the group consisting of peptidase C64 family, ZC3H12 family, STAT-induced STAT inhibitor (SSI) family and CBL family and compared with cells whose expression of functionally active fragments is reduced and/or whose activity is unchanged, at least 2 selected from the group consisting of peptidase C64 family, ZC3H12 family, STAT-induced STAT inhibitor (SSI) family and CBL family Cells obtained by reducing expression and/or attenuating activity of each family member and/or functionally active fragment thereof exhibit improved cellular properties.
[0601] 17. The method of embodiment 16, wherein the improved cell characteristics comprise one or more selected from the group consisting of: improved cell proliferation capacity, increased proportion of viable cells, improved proportion of cell subpopulations, increased ability to secrete cytokines and improve the killing ability of tumor cells.
[0602] 18. The method of embodiment 17, wherein the improved proportion of cell subpopulations comprises one or more selected from the group consisting of: an increased proportion of activated cells, a reduced proportion of regulatory cells, a reduced proportion of exhausted cells. proportion, increased proportion of central memory cells and/or naive cells, decreased proportion of apoptotic cells and increased proportion of stem cell-like cells.
[0603] 19. The method according to any one of embodiments 1-18, wherein the family members selected from the group consisting of the peptidase C64 family, the ZC3H12 family, the STAT-induced STAT inhibitor (SSI) family, and the CBL family comprise ubiquitin binding domain, C3H1 type zinc finger domain, SH2 domain and SH3 domain, respectively.
[0604] 20. The method according to any one of embodiments 1-19, wherein the family members selected from the group consisting of the peptidase C64 family, the ZC3H12 family, the STAT-induced STAT inhibitor (SSI) family, and the CBL family respectively comprise TNFAIP3, ZC3H12A, SOCS1 and CBLB.
[0605] 21. The method of any one of embodiments 1-20, wherein the cell is treated with a STAT inhibitor (SSI) selected from the group consisting of peptidase C64 family, ZC3H12 family, the STAT-induced STAT inhibitor (SSI) family and the CBL family involves the introduction of a gene regulatory system into the cells.
[0606] 22. The method of embodiment 21, wherein the gene regulatory system destroys the family member selected from the group consisting of the peptidase C64 family, the ZC3H12 family, the STAT-induced STAT inhibitor (SSI) family and the CBL family at the DNA level; and optionally, the cells are selected from the group consisting of BRD4, FAS, FIBP, IKZF1, LAG3, MED12, PD1, RASA2, TIGIT, TIM3, ADNP, NFKBIA, PTPN6 and TNIP1 with reduced expression and/or attenuated activity.
[0607] 23. The method of any one of embodiments 21-22, wherein the gene regulatory system comprises a guide nucleic acid molecule and an enzymatic protein.
[0608] 24. The method of embodiment 23, wherein reducing the expression and/or attenuating the activity of the family member selected from the group consisting of the peptidase C64 family, the ZC3H12 family, the STAT-induced STAT inhibitor (SSI) family and the CBL family comprises: a complex containing the guide nucleic acid molecule and the enzyme protein or a complex containing the guide nucleic acid molecule and a nucleic acid encoding the enzyme protein, an LNP including gRNA and Cas protein, or an LNP containing encoding gRNA and encoding Cas The protein nucleic acid LNP is introduced into the cells.
[0609] 25. The method according to any one of embodiments 23-24, wherein the enzyme protein comprises a Cas protein, a Cas protein homologue, or a functionally active fragment thereof, preferably selected from Cas 9 and Cas 12.
[0610] 26. The method of any one of embodiments 23-25, wherein the guide nucleic acid molecule comprises a guide RNA (gRNA).
[0611] 27. The method according to any one of embodiments 23-26, wherein the guide nucleic acid molecule is selected from the group consisting of the peptidase C64 family, the ZC3H12 family, the STAT-induced STAT inhibitor (SSI) family, and the CBL family. Sequence combination of at least 2 family members.
[0612] 28. The method of any one of embodiments 23-27, wherein the guide nucleic acid molecule is about 15 to about 25 upstream of the 5′ end of a protospacer adjacent motif (PAM) selected from the group consisting of: A sequence consisting of nucleotides: AGG, TGG, CGG, and GGG, or a sequence consisting of about 15 to about 25 nucleotides downstream of the 3′ end of a protospacer adjacent motif (PAM) selected from the group shown below Combined with: NTTN, TTYN, VTTV, TRTV, TTTV, TATV, TYCV, TNN, and NTN, where N is A, T, C, or G, Y is T or C, Vis A, C, or G, and R is A or G.
[0613] 29. The method according to any one of embodiments 23-28, wherein the guide nucleic acid molecule binds to a region selected from the group defined by genomic coordinates shown in Tables 2A-2D or Tables 3A-3D, or a fragment thereof.
[0614] 30. The method according to any one of embodiments 23-29, wherein the guide nucleic acid molecule binds to at least 2 regions or fragments thereof selected from the group consisting of: SEQ ID NO: 107-212, 1562-2532, SEQ ID NOs: 281-348, 3116-3698, SEQ ID NOs: 399-448, 4393-5086, and SEQ ID NOs: 520-590, 6177-7266.
[0615] 31. The method of any one of embodiments 23-30, wherein the guide nucleic acid molecule comprises a targeting domain comprising SEQ ID NOs: 1-106, 591-1561, 7267-7324, 7419, 7420, SEQ ID NO: 213-280, 2533-3115, 7325-7345, 7416, 7417, SEQ ID NO: 349-398, 3699-4392, 7346-7375, 7418, and SEQ ID NO: At least 2 of the sequences shown in 449-519, 5087-6176, 7376-7413, 7414, and 7415.
[0616] 32. The method according to any one of embodiments 1-31, wherein the expression and/or Expression in cells obtained by reducing the expression and/or weakening the activity of the family members selected from the group consisting of the peptidase C64 family, the ZC3H12 family, the STAT-induced STAT inhibitor (SSI) family and the CBL family compared to cells whose activity remains unchanged. The cell proportion of the target gene decreases and/or the expression level of the target gene in a single cell decreases.
[0617] 33. The method of any one of embodiments 1-32, wherein the expression of the family member selected from the group consisting of the peptidase C64 family, the ZC3H12 family, the STAT-induced STAT inhibitor (SSI) family, and the CBL family is reduced And/or the proportion of cells expressing the target gene among the cells obtained with weakened activity is about 95% or less.
[0618] 34. A cell obtained by the method of any one of embodiments 1-33.
[0619] 35. A pharmaceutical composition comprising the cell of embodiment 34, and optionally a pharmaceutically acceptable carrier. 36. A method of affecting cell growth, comprising administering the cells of embodiment 34 and/or the pharmaceutical composition of embodiment 35.
[0620] 37. Use of the cells of embodiment 34 and/or the pharmaceutical composition of embodiment 35 in the preparation of a medicament for preventing and/or treating diseases and/or symptoms.
[0621] 38. A medicament for preventing and/or treating diseases and/or symptoms, comprising the cell of embodiment 34 and/or the pharmaceutical composition of embodiment 35 as an active ingredient.
[0622] 39. A method for preventing and/or treating diseases and/or symptoms, comprising administering the cells of embodiment 34 and/or the pharmaceutical composition of embodiment 35 to a subject in need thereof.
[0623] 40. The cell of embodiment 34 and/or the pharmaceutical composition of embodiment 35, for use in preventing and/or treating diseases and/or symptoms.
[0624] 41. The use according to embodiment 37, the medicament according to embodiment 38, the method according to embodiment 39, and/or the cells and/or pharmaceutical compositions according to the use according to embodiment 40, wherein the the diseases and/or symptoms described above include tumors.
[0625] 42. The use according to embodiment 37, the medicament according to embodiment 38, the method according to embodiment 39, and/or the cells and/or pharmaceutical compositions according to the use according to embodiment 40, wherein the the diseases and/or symptoms described include solid tumors.
[0626] 43. The use according to embodiment 37, the medicament according to embodiment 38, the method according to embodiment 39, and/or the cells and/or pharmaceutical compositions according to the use according to embodiment 40, wherein the the diseases and/or symptoms include one or more selected from the group consisting of melanoma, ovarian cancer, cervical cancer, lung cancer, bladder cancer, breast cancer, head and neck cancer, pancreatic cancer, liver cancer, stomach cancer, colorectal cancer, and kidney cancer.

[0627] The present invention provides a method for reducing the expression of members of at least two families selected from the peptidase C64 family, the ZC3H12 family, the STAT-induced STAT inhibitor (SSI) family and the CBL family and/or functionally active fragments thereof in the cells, and/or activity reduction methods.

[0628] On the one hand, the present invention provides a method of culturing cells, so that the expression and/or activity of at least two families members selected from the group consisting of the peptidase C64 family, the ZC3H12 family, the STAT-induced STAT inhibitor (SSI) family, and the CBL family, or their functional fragments is reduced.

[0629] For example, the cells may further comprise reduced expression and/or attenuated activity optionally selected from the group consisting of BRD4, FAS, FIBP, IKZF1, LAG3, MED12, PD1, RASA2, TIGIT, TIM3, ADNP, NFKBIA, PTPN6 and TNIP1.

[0630] For example, the peptidase C64 family member may comprise a ubiquitin binding domain. For example, the peptidase C64 family member may comprise TNFAIP3.

[0631] For example, the ZC3H12 family member may comprise a C3H1-type zinc finger domain. For example, the ZC3H12 family member may comprise ZC3H12A.

[0632] For example, the STAT-induced STAT inhibitor (SSI) family member may comprise an SH2 domain. For example, the STAT-induced STAT inhibitor (SSI) family member may comprise SOCS1.

[0633] For example, the CBL family member may comprise an SH3 domain. For example, the CBL family member may include CBLB.

[0634] For example, in the cells of the present invention, the expression of peptidase C64 family and ZC3H12 family members and/or functionally active fragments thereof is reduced and/or the activity is weakened. For example, the expression and/or activity of TNFAIP3 and ZC3H12A are reduced.

[0635] For example, in the cells of the present invention, the expression of the peptidase C64 family and the STAT-induced STAT inhibitor (SSI) family members and/or functionally active fragments thereof is reduced and/or the activity is weakened. For example, the expression and/or activity of TNFAIP3 and SOCS1 are reduced.

[0636] For example, in the cells of the present invention, the expression of peptidase C64 family and CBL family members and/or functionally active fragments thereof is reduced and/or the activity is weakened. For example, the expression and/or activity of TNFAIP3 and CBLB are reduced.

[0637] For example, in the cells of the present invention, the expression of ZC3H12 family and STAT-induced STAT inhibitor (SSI) family members and/or functionally active fragments thereof is reduced and/or the activity is weakened. For example, the expression and/or activity of ZC3H12A and SOCS1 are reduced.

[0638] For example, in the cells of the present invention, the expression of ZC3H12 family and CBL family members and/or functionally active fragments thereof is reduced and/or the activity is weakened. For example, the expression and/or activity of ZC3H12A and CBLB are reduced.

[0639] For example, in the cells of the present invention, the expression of STAT-induced STAT inhibitor (SSI) family and CBL family members and/or functionally active fragments thereof is reduced and/or the activity is weakened. For example, the expression and/or activity of SOCS1 and CBLB are reduced.

[0640] For example, in the cells of the present invention, the expression of peptidase C64 family, ZC3H12 family and STAT-induced STAT inhibitor (SSI) family members and/or functionally active fragments thereof is reduced and/or the activity is weakened. For example, the expression and/or activity of TNFAIP3, ZC3H12A and SOCS1 are reduced.

[0641] For example, in the cells of the present invention, the expression of peptidase C64 family, ZC3H12 family and CBL family members and/or functionally active fragments thereof is reduced and/or the activity is weakened. For example, the expression and/or activity of TNFAIP3, ZC3H12A and CBLB are reduced.

[0642] For example, in the cells of the present invention, the expression of peptidase C64 family, STAT-induced STAT inhibitor (SSI) family and CBL family members and/or functionally active fragments thereof is reduced and/or the activity is weakened. For example, the expression and/or activity of TNFAIP3, SOCS1 and CBLB are reduced.

[0643] For example, in the cells of the present invention, the expression of ZC3H12 family, STAT-induced STAT inhibitor (SSI) family and CBL family members and/or functionally active fragments thereof is reduced and/or the activity is weakened. For example, the expression and/or activity of ZC3H12A, SOCS1 and CBLB are reduced.

[0644] For example, in the cells of the present invention, the expression of peptidase C64 family, ZC3H12 family, STAT-induced STAT inhibitor (SSI) family and CBL family members and/or functionally active fragments thereof is reduced and/or the activity is weakened. For example, the expression and/or activity of TNFAIP3, ZC3H12A, SOCS1 and CBLB are reduced.

[0645] For example, the target gene of the present invention may be a gene encoding members and/or functionally active fragments of at least two families selected from the peptidase C64 family, the ZC3H12 family, the STAT-induced STAT inhibitor (SSI) family, and the CBL family. For example, cells obtained by reducing the expression and/or activity of at least two genes of interest in the cells may show improved cell properties compared to cells whose expression and/or activity of the genes of interest are unchanged. In one embodiment, the cells whose expression and/or activity of the target gene are unchanged may refer to cells derived from the same donor and in which the expression and/or activity of at least two target genes of the cells have not been reduced. In one embodiment, cells whose expression and/or activity of the target gene are unchanged may refer to cells derived from the same donor and in which the expression and/or activity of other genes other than the target gene of the cells have not been altered (e.g., knocking out the other genes has basically no impact on cell function).

[0646] In one embodiment, the corresponding cells that have not reduced the expression and/or weakened the activity of at least two target genes of the cells may refer to cells derived from the same donor that have been isolated in the same way and that have not caused the cells to Cells with reduced expression and/or weakened activity of at least 2 target genes. In one embodiment, the corresponding cells that have not reduced the expression and/or weakened the activity of at least two target genes of the cells may refer to the same tumor origin from the same donor and have not caused at least two of the cells with reduced expression and/or weakened activity of 2 target genes. In one embodiment, the corresponding cells that have not reduced the expression and/or weakened the activity of at least two target genes of the cells may refer to dividing cells from the same tumor origin from the same donor into two groups, wherein a group of cells in which the expression and/or activity of at least two target genes of the cells have not been reduced may be corresponding cells in which the expression of at least two target genes of the cells has not been reduced and/or the activity has been weakened. For example, the reduced expression and/or weakened activity of at least two target genes may mean that the target genes in natural cells are in a certain degree of expression. After the treatment of the present invention, the expression level of the target genes in the cells can be reduced. Reducing, that is, reducing the expression level of the target gene, can be caused by converting natural cells from expressing the target gene to essentially not expressing the target gene or reducing the amount of expression of the target gene.

[0647] For example, the cells include immune cells. For example, the cells comprise immune effector cells. For example, the cells include immune effector T cells, immune effector NK cells, and immune effector NKT cells. For example, the cells include phagocytes, lymphocytes, neutrophils, eosinophils and/or basophils.

[0648] For example, the cells include monocytes, macrophages, and/or dendritic cells.

[0649] For example, the cells of the present invention also include cells derived from differentiation of stem cells. For example, the cells of the present invention also include cells derived from differentiation of pluripotent stem cells. For example, the stem cells of the present invention can be obtained by induction. For example, the above-mentioned stem cells of the present invention may include induced pluripotent stem cells (iPSCs), embryonic stem cells, bone marrow stem cells, umbilical cord blood stem cells and/or peripheral blood stem cells.

[0650] For example, “stem cells” of the present invention also include pluripotent cells, multipotent cells, precursor cells and progenitor cells. For example, stem cells can be obtained from hematopoietic or mesenchymal stem cells obtained from bone marrow tissue, placental stem cells obtained from placental tissue, embryonic stem cells obtained from embryonic tissue, or embryonic germ cells obtained from the reproductive tissue of the fetus. Exemplary pluripotent stem cells can also be generated from somatic cells by reprogramming them to a pluripotent state through the expression of certain transcription factors associated with pluripotency; these cells are called “induced pluripotent stem cells” or “iPSCs”.

[0651] For example, the cells include B cells, T cells, natural killer cells and/or natural killer-like T cells (NKT). For example, “unmodified cells” or “unmodified cells” may refer to cells in which the genome has not been modified and does not contain a gene regulatory system or contains a control gene regulatory system (e.g., empty vector control, non-targeting gRNA, interfering siRNA, etc.) cells or cell populations. For example, the cells comprise αβ T cells and/or γδ T cells. For example, the cells include tumor-infiltrating lymphocytes (TILs). For example, the TIL is a TIL derived from tumor tissue, tumor-associated lymph nodes with or without tumor metastasis, tumor metastasis, fragments of paracancerous tissue, pleural effusion and/or peritoneal effusion and/or derived from frozen Save the TIL after recovery.

[0652] For example, the TILs of the present invention may be TILs and/or sources derived from tumor tissue, tumor-associated lymph nodes with or without tumor metastasis, tumor metastasis foci, fragments of paracancerous tissue, pleural effusion and/or peritoneal effusion. TILs recovered after cryopreservation. For example, TILs of the present invention can be obtained by processing tumor tissue into tumor fragments. For example, the tumor fragments of the present invention have a volume of approximately 1 to 27 cubic millimeters. For example, the volume of the tumor fragments of the present invention is about 1 cubic millimeter, about 2 cubic millimeters, about 3 cubic millimeters, about 4 cubic millimeters, about 5 cubic millimeters, about 6 cubic millimeters, about 7 cubic millimeters, about 8 cubic millimeters, about 9 cubic millimeters, about 10 cubic millimeters, about 11 cubic millimeters, about 12 cubic millimeters, about 13 cubic millimeters, about 14 cubic millimeters, about 15 cubic millimeters mm, about 16 cubic millimeters, about 17 cubic millimeters, about 18 cubic millimeters, about 19 cubic millimeters, about 20 cubic millimeters, about 21 cubic millimeters, about 23 cubic millimeters, about 24 cubic millimeters, about 25 cubic millimeters, about 26 cubic millimeters mm or approximately 27 cubic millimeters.

[0653] For example, the cells comprise engineered immune receptors displayed on the cell surface. For example, the engineered immune receptor specifically binds to an antigen expressed on a target cell. For example, the cells comprise chimeric antigen receptors and/or T cell receptors.

[0654] In one aspect, the present invention provides a method for culturing tumor infiltrating lymphocytes (TIL), which may include: making the TIL comprise a protein selected from the group consisting of the peptidase C64 family, the ZC3H12 family, the STAT-induced STAT inhibitor (SSI) family, and the CBL family. The expression and/or activity of at least 2 family members and/or functionally active fragments thereof are reduced.

[0655] For example, TILs derived from tumor tissue, tumor-associated lymph nodes with or without tumor metastasis, tumor metastasis lesions, fragments of paracancerous tissue, pleural effusion and/or peritoneal effusion and have not been amplified in vitro can be subjected to at least One stage of in vitro amplification, wherein in at least one stage of the in vitro amplification, the TIL may be selected from the group consisting of peptidase C64 family, ZC3H12 family, STAT-induced STAT inhibitor (SSI) family, and the CBLfamily. The expression and/or activity of at least 2 family members and/or functionally active fragments thereof are reduced.

[0656] For example, the present invention can be derived from tumor tissue, tumor-related lymph nodes with or without tumor metastasis, tumor metastasis foci, fragments of paracancerous tissue, pleural effusion and/or peritoneal effusion without in vitro amplification. TIL undergoes the first stage of in vitro amplification and the second stage of in vitro amplification, and in the second stage of in vitro amplification of the present invention, the TIL can be selected from the group consisting of peptidase C64 family, ZC3H12 family, and STAT-induced STAT inhibition. The expression and/or activity of at least 2 members of the agent (SSI) family and the CBL family and/or functionally active fragments thereof is reduced. For example, the tumor tissue or tumor-related lymph node derived from the present invention can be accompanied or not accompanied by tumor metastasis, tumor metastasis, fragments of adjacent cancer tissue, pleural effusion and/or peritoneal effusion and have not been amplified in vitro have undergone the first stage of in vitro amplification and the second stage of in vitro amplification, and In the first stage of in vitro amplification of the present invention, members of at least two families selected from the peptidase C64 family, the ZC3H12 family, the STAT-induced STAT inhibitor (SSI) family and the CBL family can be used in the TIL/or reduced expression and/or activity of functionally active fragments thereof.

[0657] For example, the present invention can be derived from tumor tissue, tumor-related lymph nodes with or without tumor metastasis, tumor metastasis foci, fragments of paracancerous tissue, pleural effusion and/or peritoneal effusion without in vitro amplification. TIL undergoes the first stage of in vitro amplification and the second stage of in vitro amplification, and in the first stage of in vitro amplification of the present invention, the TIL can be selected from the peptidase C64 family, the ZC3H12 family, and STAT-induced STAT inhibition The expression and/or activity of at least 2 members of the agent (SSI) family and the CBL family and/or functionally active fragments thereof are reduced, and in the second stage of in vitro expansion of the present invention, the TIL can be The expression and/or activity of at least two family members and/or functionally active fragments thereof selected from the peptidase C64 family, the ZC3H12 family, the STAT-induced STAT inhibitor (SSI) family, and the CBL family is reduced.

[0658] For example, the present invention can be derived from tumor tissue, tumor-related lymph nodes with or without tumor metastasis, tumor metastasis foci, fragments of paracancerous tissue, pleural effusion and/or peritoneal effusion without in vitro amplification. TIL undergoes the first stage of in vitro amplification, the second stage of in vitro amplification and the third stage of in vitro amplification, and in the first stage of in vitro amplification of the present invention, the TIL can be selected from the group consisting of peptidase C64 family, ZC3H12 The expression and/or activity of at least 2 members of the STAT family, the STAT-induced STAT inhibitor (SSI) family and the CBL family and/or functionally active fragments thereof is reduced.

[0659] For example, the present invention can be derived from tumor tissue, tumor-related lymph nodes with or without tumor metastasis, tumor metastasis foci, fragments of paracancerous tissue, pleural effusion and/or peritoneal effusion without in vitro amplification. TIL undergoes the first stage of in vitro amplification, the second stage of in vitro amplification and the third stage of in vitro amplification, and in the second stage of in vitro amplification of the present invention, the TIL has reduced expression and/or activity of members of at least two families selected from the peptidase C64 family, ZC3H12 family, STAT-induced STAT inhibitor (SSI) family and CBL family and/or functionally active fragments thereof.

[0660] For example, the present invention can be derived from tumor tissue, tumor-related lymph nodes with or without tumor metastasis, tumor metastasis foci, fragments of paracancerous tissue, pleural effusion and/or peritoneal effusion without in vitro amplification. TIL undergoes the first stage of in vitro amplification, the second stage of in vitro amplification and the third stage of in vitro amplification, and in the third stage of in vitro amplification of the present invention, the expression and/or activity of at least 2 members of peptidase C64 family, the ZC3H12 family, the STAT-induced STAT inhibitor (SSI) family and the CBL family and/or functionally active fragments thereof is reduced.

[0661] For example, the present invention can be derived from tumor tissue, tumor-related lymph nodes with or without tumor metastasis, tumor metastasis foci, fragments of paracancerous tissue, pleural effusion and/or peritoneal effusion without in vitro amplification. TIL undergoes the first stage of in vitro amplification, the second stage of in vitro amplification and the third stage of in vitro amplification, and in the first stage of in vitro amplification of the present invention, the expression and/or activity of at least 2 members of peptidase C64 family, the ZC3H12 family, the STAT-induced STAT inhibitor (SSI) family and the CBL family and/or functionally active fragments thereof is reduced, and in the second stage in vitro amplification of the present invention, the expression and/or activity of at least 2 members of peptidase C64 family, the ZC3H12 family, the STAT-induced STAT inhibitor (SSI) family and the CBL family and/or functionally active fragments thereof is reduced.

[0662] For example, the present invention can be derived from tumor tissue, tumor-related lymph nodes with or without tumor metastasis, tumor metastasis foci, fragments of paracancerous tissue, pleural effusion and/or peritoneal effusion without in vitro amplification. TIL undergoes the first stage of in vitro amplification, the second stage of in vitro amplification and the third stage of in vitro amplification, and in the first stage of in vitro amplification of the present invention, the expression and/or activity of at least 2 members of peptidase C64 family, the ZC3H12 family, the STAT-induced STAT inhibitor (SSI) family and the CBL family and/or functionally active fragments thereof is reduced, and in the third stage in vitro amplification of the present invention, the expression and/or activity of at least 2 members of peptidase C64 family, the ZC3H12 family, the STAT-induced STAT inhibitor (SSI) family and the CBL family and/or functionally active fragments thereof is reduced.

[0663] For example, the present invention can be derived from tumor tissue, tumor-related lymph nodes with or without tumor metastasis, tumor metastasis foci, fragments of paracancerous tissue, pleural effusion and/or peritoneal effusion without in vitro amplification. TIL undergoes the first stage of in vitro amplification, the second stage of in vitro amplification and the third stage of in vitro amplification, and in the second stage of in vitro amplification of the present invention, the expression and/or activity of at least 2 members of peptidase C64 family, the ZC3H12 family, the STAT-induced STAT inhibitor (SSI) family and the CBL family and/or functionally active fragments thereof is reduced, and in the third stage in vitro amplification of the present invention, the expression and/or activity of at least 2 members of peptidase C64 family, the ZC3H12 family, the STAT-induced STAT inhibitor (SSI) family and the CBL family and/or functionally active fragments thereof is reduced.

[0664] For example, TILs derived from tumor tissue, tumor-related lymph nodes with or without tumor metastasis, tumor metastasis foci, fragments of paracancerous tissue, pleural effusion and/or peritoneal effusion without in vitro amplification undergoe the first stage of in vitro amplification, the second stage of in vitro amplification and the third stage of in vitro amplification, and in the first stage of in vitro amplification of the present invention, the expression and/or activity of at least 2 members of peptidase C64 family, the ZC3H12 family, the STAT-induced STAT inhibitor (SSI) family and the CBL family and/or functionally active fragments thereof is reduced, and in the second stage in vitro amplification of the present invention, the expression and/or activity of at least 2 members of peptidase C64 family, the ZC3H12 family, the STAT-induced STAT inhibitor (SSI) family and the CBL family and/or functionally active fragments thereof is reduced, and in the third stage of in vitro expansion of the present invention, the expression and/or activity of at least 2 members of peptidase C64 family, the ZC3H12 family, the STAT-induced STAT inhibitor (SSI) family and the CBL family and/or functionally active fragments thereof is reduced.

[0665] For example, changes in the number of TIL cells between each stage of in vitro expansion can be used to define each stage of in vitro expansion. For example, when the number of TIL cells increases at least approximately 1-fold, the TIL cells can be considered to have entered the next stage of in vitro expansion. In some embodiments, when the number of TIL cells increases at least about 1-1000 times, for example, at least about 1 times, at least about 2 times, at least about 3 times, at least about 4 times, at least about 5 times, at least about 6 times, at least about 7 times, at least about 8 times, at least about 9 times, at least about 10 times, at least about 11 times, at least about 12 times, at least about 13 times, at least about 14 times, at least about 15 times, at least about 20 times, at least about 30 times, at least about 40 times, at least about 50 times, at least about 100 times, at least about 200 times, at least about 500 times, or at least about 1000 times, it can be considered that the TIL cells have entered the next stage of in vitro expansion. For example, each stage of in vitro expansion can also be divided by changes in TIL cell culture conditions. For example, when cell activators and/or cell growth factors are added or supplemented in the cell culture medium, the TIL cells can be considered to have entered the next stage of in vitro expansion. For example, when IL-2 is added or supplemented to the cell culture medium, TIL cells can be considered to have entered the next stage of in vitro expansion. For example, when one or more gene regulatory systems are added or supplemented to the cell culture medium, TIL cells can be considered to have entered the next stage of in vitro expansion. For example, when feeder cells are added or supplemented to the cell culture medium, TIL cells can be considered to have entered the next stage of in vitro expansion. For example, when TIL cells undergo centrifugation and/or cell washing, the TIL cells can be considered to have entered the next stage of in vitro expansion. For example, each stage can also be divided by the number of days in which TIL cells are cultured. For example, when TIL cells are cultured in vitro for about 1-100 days, such as about 1 day, about 2 days, about 3 days, about 4 days, about 5 days, about 6 days, about 7 days, about 8 days, about 9 days, about 10 days, about 11 days, about 12 days, about 13 days, about 14 days, about 15 days, about 16 days, about 17 days, about 18 days, about 19 days, about 20 days, about 30 days, about 40 days Days, approximately 50 days, or approximately 100 days later, the TIL cells can be considered to have entered the next stage of in vitro expansion.

[0666] For example, the reducing the expression and/or weakening the activity of the peptidase C64 family member of the cell includes inhibiting the function of a deubiquitinating enzyme and/or a zinc finger nuclease.

[0667] For example, the reducing the expression and/or weakening the activity of the ZC3H12 family member of the cell includes inhibiting the function of a nuclease.

[0668] For example, wherein said reducing the expression and/or attenuating the activity of a member of the STAT-induced STAT inhibitor (SSI) family in said cell comprises inhibiting the function of negative regulation of cytokine signaling.

[0669] For example, the reducing the expression and/or weakening the activity of the CBL family member of the cell includes inhibiting the function of E3 ubiquitin protein ligase.

[0670] For example, compared with cells in which the expression and/or activity of members of at least 2 families selected from the peptidase C64 family, the ZC3H12 family, the STAT-induced STAT inhibitor (SSI) family, and the CBL family is unchanged, the Cells obtained by reducing the expression and/or attenuating the activity of members of at least 2 families selected from the group consisting of the peptidase C64 family, the ZC3H12 family, the STAT-induced STAT inhibitor (SSI) family and the CBL family show improved cell properties.

[0671] For example, the improved cell characteristics include one or more selected from the group consisting of: improved cell proliferation (i.e., cell number), increased proportion of viable cells, improved proportion of cell subpopulations, increased cytokine secretion capacity, improved tumor cell killing ability in vitro and improved tumor killing ability in vivo.

[0672] For example, the improved cell subpopulation ratio includes one or more selected from the group consisting of an increased activated cell ratio, a reduced regulatory cell ratio, a reduced exhausted cell ratio, an increased central memory cell, and/or Proportion of immature cells, decreased proportion of apoptotic cells, and increased proportion of stem cell-like cells.

[0673] For example, the improved cell number of the present invention refers to the expression and/or activity of at least two families selected from the peptidase C64 family, the ZC3H12 family, the STAT-induced STAT inhibitor (SSI) family, and the CBL family. Compared with cells, the expression of at least two families selected from the peptidase C64 family, the ZC3H12 family, the STAT-induced STAT inhibitor (SSI) family and the CBL family is reduced in at least one in vitro expansion stage, and/or the cell number of the cells of the invention with reduced activity can be increased by at least about 1-50 times, for example, about 1 times less, at least about 2 times, at least about 3 times, at least about 4 times, at least about 5 times, at least about 6 times, at least about 7 times, at least about 8 times, at least about 9 times, at least about 10 times, at least about 11 times, at least about 12 times, at least about 13 times, at least about 14 times, at least about 15 times, at least about 20 times, at least about 30 times, at least about 40 times, or at least about 50 times.

[0674] For example, an increased proportion of viable cells can manifest itself as an increase in cell viability. For example, the increased proportion of living cells in the present invention may refer to the expression and/or activity of members of at least two families selected from the group consisting of the peptidase C64 family, the ZC3H12 family, the STAT-induced STAT inhibitor (SSI) family, and the CBL family. Compared with unchanged cells, the members of at least 2 families selected from the group consisting of the peptidase C64 family, the ZC3H12 family, the STAT-induced STAT inhibitor (SSI) family and the CBL family are used in at least one in vitro expansion stage. The proportion of viable cells of the cells of the present invention with reduced expression and/or weakened activity can be increased by at least about 100-0.1%, such as at least about 100%, at least about 90%, at least about 80%, at least about 70%, at least about 60%, At least about 50%, at least about 40%, at least about 30%, at least about 20%, at least about 19%, at least about 18%, at least about 17%, at least about 16%, at least about 15%, at least about 14%, At least about 13%, at least about 12%, at least about 11%, at least about 10%, at least about 9%, at least about 8%, at least about 7%, at least about 6%, at least about 5%, at least about 4%, At least about 3%, at least about 2%, at least about 1%, at least about 0.9%, at least about 0.8%, at least about 0.7%, at least about 0.6%, at least about 0.5%, at least about 0.4%, at least about 0.3%, At least about 0.2%, or at least about 0.1%.

[0675] For example, the increased cytokine secretion ability of the present invention may refer to an increase in the cytokine secretion ability of a cell selected from the group consisting of: IL-2, IL-6, CD107a, GZMB, TNF-α, and IFN-γ. For example, the improved cytokine secretion ability of the present invention may refer to the expression and/or expression of members of at least two families selected from the group consisting of the peptidase C64 family, the ZC3H12 family, the STAT-induced STAT inhibitor (SSI) family, and the CBL family. Compared to cells with unchanged activity, members of at least 2 families selected from the group consisting of the peptidase C64 family, the ZC3H12 family, the STAT-induced STAT inhibitor (SSI) family and the CBL family are used in at least one in vitro expansion stage. The proportion of cells secreting cytokines in the cells of the present invention with reduced expression and/or weakened activity can be increased by at least about 1-50 times, such as at least about 1 time, at least about 2 times, at least about 3 times, at least about 4 times, at least about 5 times, at least about 6 times, at least about 7 times, at least about 8 times, at least about 9 times, at least about 10 times, at least about 11 times, at least about 12 times, at least about 13 times, at least about 14 times, at least about 15 times, at least about 20 times, at least about 30 times, at least about 40 times, or at least about 50 times. For example, the improved cytokine secretion ability of the present invention may refer to the expression and/or expression of members of at least two families selected from the group consisting of the peptidase C64 family, the ZC3H12 family, the STAT-induced STAT inhibitor (SSI) family, and the CBL family. Or compared with cells whose activity has not changed, in at least one in vitro expansion stage, at least 2 families selected from the peptidase C64 family, the ZC3H12 family, the STAT-induced STAT inhibitor (SSI) family and the CBL family are The proportion of cells secreting cytokines in cells of the invention with reduced expression and/or weakened activity of members can be increased by at least about 100-0.1%, for example, at least about 100%, at least about 90%, at least about 80%, at least about 70%, At least about 60%, at least about 50%, at least about 40%, at least about 30%, at least about 20%, at least about 19%, at least about 18%, at least about 17%, at least about 16%, at least about 15%, At least about 14%, at least about 13%, at least about 12%, at least about 11%, at least about 10%, at least about 9%, at least about 8%, at least about 7%, at least about 6%, at least about 5%, At least about 4%, at least about 3%, at least about 2%, at least about 1%, at least about 0.9%, at least about 0.8%, at least about 0.7%, at least about 0.6%, at least about 0.5%, at least about 0.4%, At least about 0.3%, at least about 0.2%, or at least about 0.1%. For example, the cytokine secretion ability of the cells of the present invention is measured by flow cytometry or CBA method (Cytometric Bead Array).

[0676] For example, the improved in vitro tumor cell killing ability and/or the improved in vivo tumor killing ability of the present invention may refer to at least one selected from the group consisting of the peptidase C64 family, the ZC3H12 family, the STAT-induced STAT inhibitor (SSI) family, and the CBL family. Cells with unchanged expression and/or activity of members of 2 families selected from the group consisting of the peptidase C64 family, ZC3H12 family, STAT-induced STAT inhibitor (SSI) family and the tumor cell killing rate of the cells of the present invention with reduced expression and/or weakened activity of at least two members of the CBL family can be increased by at least about 1-50 times, for example, at least about 1 time, at least about 2 times, at least about 3 times. times, at least about 4 times, at least about 5 times, at least about 6 times, at least about 7 times, at least about 8 times, at least about 9 times, at least about 10 times, at least about 11 times, at least about 12 times, at least about 13 times times, at least about 14 times, at least about 15 times, at least about 20 ∂times, at least about 30 times, at least about 40 times, or at least about 50 times. For example, the improved in vitro tumor cell killing ability and/or the improved in vivo tumor killing ability of the present invention may refer to at least one selected from the group consisting of the peptidase C64 family, the ZC3H12 family, the STAT-induced STAT inhibitor (SSI) family, and the CBL family. Cells with unchanged expression and/or activity of members of 2 families selected from the group consisting of the peptidase C64 family, ZC3H12 family, STAT-induced STAT inhibitor (SSI) family and The tumor cell killing rate of the cells of the present invention with reduced expression and/or weakened activity of at least two members of the CBL family can be increased by at least about 100-0.1%, such as at least about 100%, at least about 90%, at least about 80%, at least about 70%, at least about 60%, at least about 50%, at least about 40%, at least about 30%, at least about 20%, at least about 19%, at least about 18%, at least about 17%, at least about 16%, at least about 15%, at least about 14%, at least about 13%, at least about 12%, at least about 11%, at least about 10%, at least about 9%, at least about 8%, at least about 7%, at least about 6%, at least about 5%, at least about 4%, at least about 3%, at least about 2%, at least about 1%, at least about 0.9%, at least about 0.8%, at least about 0.7%, at least about 0.6%, at least about 0.5%, at least about 0.4%, at least about 0.3%, at least about 0.2%, or at least about 0.1%. For example, the tumor cell killing rate of the cells of the present invention can be measured by the IncuCyte system or CFSE and DAPI staining methods. For example, tumor cell killing of the cells of the present invention may refer to the ability of the cells to kill solid tumor cells.

[0677] For example, the improved cell subpopulation ratio of the present invention may comprise one or more selected from the following group: increased CD8⁺ Cell proportion, increased proportion of central memory cells and/or naive cells, decreased proportion of regulatory cells, increased proportion of activated cells, increased proportion of tumor-specific cells (with CD103⁺ CD39⁺ phenotype), increased proportion of stem cell-like cells, decreased proportion of exhausted cells, and decreased proportion of apoptotic cells.

[0678] For example, the CD8 increased by the present invention⁺ The cell ratio may be an increase in the proportion of CD8 positive cells among the cells. For example, in cells CD8⁺ The cell proportion can be increased by at least about 100-0.1%, such as at least about 100%, at least about 90%, at least about 80%, at least about 70%, at least about 60%, at least about 50%, at least about 40%, at least about 30%, at least about 20%, at least about 19%, at least about 18%, at least about 17%, at least about 16%, at least about 15%, at least about 14%, at least about 13%, at least about 12%, at least about 11%, at least about 10%, at least about 9%, at least about 8%, at least about 7%, at least about 6%, at least about 5%, At least about 4%, at least about 3%, at least about 2%, at least about 1%, at least about 0.9%, at least about 0.8%, at least about 0.7%, at least about 0.6%, at least about 0.5%, at least about 0.4%, At least about 0.3%, at least about 0.2%, or at least about 0.1%.

[0679] For example, the increased proportion of activated cells by the present invention can be the increased proportion of CD28⁺, CD25⁺ and/or 41BB⁺ cells. For example, the proportion of activated cells in the cells can be increased by at least about 100-0.1%, such as at least about 100%, at least about 90%, at least about 80%, at least about 70%, at least about 60%, at least about 50%, at least about 40%, at least about 30%, at least about 20%, at least about 19%, at least about 18%, at least about 17%, at least about 16%, at least about 15%, at least about 14%, at least about 13%, at least about 12%, at least about 11%, at least about 10%, at least about 9%, at least about 8%, at least about 7%, at least about 6%, at least about 5%, at least about 4%, at least about 3%, at least about 2%, at least about 1%, at least about 0.9%, at least about 0.8%, at least about 0.7%, at least about 0.6%, at least about 0.5%, at least about 0.4%, at least about 0.3%, at least about 0.2%, or at least About 0.1%, or can be increased by at least about 1-50 times, such as at least about 1 time, at least about 2 times, at least about 3 times, at least about 4 times, at least about 5 times, at least about 6 times, at least about 7 times, At least about 8 times, at least about 9 times, at least about 10 times, at least about 11 times, at least about 12 times, at least about 13 times, at least about 14 times, at least about 15 times, at least about 20 times, at least about 30 times, At least about 40 times, or at least about 50 times.

[0680] For example, the proportion of exhausted cells reduced by the present invention can be the increased proportion of PD-1⁺, LAG-3⁺, TIM-3⁺, CD39⁺, CD38⁺ and/or CD101⁺ cells. For example, the proportion of depleted cells in the cells can be reduced by at least about 100-0.1%, such as at least about 100%, at least about 90%, at least about 80%, at least about 70%, at least about 60%, at least about 50%, at least about 40%, at least about 30%, at least about 20%, at least about 19%, at least about 18%, at least about 17%, at least about 16%, at least about 15%, at least about 14%, at least about 13%, at least about 12%, at least about 11%, at least about 10%, at least about 9%, at least about 8%, at least about 7%, at least about 6%, at least about 5%, at least about 4%, at least about 3%, at least about 2%, at least about 1%, at least about 0.9%, at least about 0.8%, at least about 0.7%, at least about 0.6%, at least about 0.5%, at least about 0.4%, at least about 0.3%, at least about 0.2%, or At least about 0.1%, or can be reduced by at least about 1-50 times, such as at least about 1 times, at least about 2 times, at least about 3 times, at least about 4 times, at least about 5 times, at least about 6 times, at least about 7 times, at least about 8 times, at least about 9 times, at least about 10 times, at least about 11 times, at least about 12 times, at least about 13 times, at least about 14 times, at least about 15 times, at least about 20 times, at least about 30 times, at least about 40 times, or at least about 50 times.

[0681] For example, the proportion of regulatory cells reduced by the present invention can be the decreased proportion of CD4⁺ CD25⁺ Foxp3⁺ cells. For example, the proportion of regulatory cells in the cells can be reduced by at least about 100-0.1%, such as at least about 100%, at least about 90%, at least about 80%, at least about 70%, at least about 60%, at least about 50%, at least About 40%, at least about 30%, at least about 20%, at least about 19%, at least about 18%, at least about 17%, at least about 16%, at least about 15%, at least about 14%, at least about 13%, at least About 12%, at least about 11%, at least about 10%, at least about 9%, at least about 8%, at least about 7%, at least about 6%, at least about 5%, at least about 4%, at least about 3%, at least About 2%, at least about 1%, at least about 0.9%, at least about 0.8%, at least about 0.7%, at least about 0.6%, at least about 0.5%, at least about 0.4%, at least about 0.3%, at least about 0.2%, or at least about 0.1%.

[0682] For example, the proportion of decreased apoptotic cells in the present invention can be the decreased proportion of Annexin V⁺7-AAD⁺ Cells and/or Annexin V⁺7-AAD⁻ cells. For example, the proportion of apoptotic cells in the cells can be reduced by at least about 100-0.1%, such as at least about 100%, at least about 90%, at least about 80%, at least about 70%, at least about 60%, at least about 50%, at least About 40%, at least about 30%, at least about 20%, at least about 19%, at least about 18%, at least about 17%, at least about 16%, at least about 15%, at least about 14%, at least about 13%, at least About 12%, at least about 11%, at least about 10%, at least about 9%, at least about 8%, at least about 7%, at least about 6%, at least about 5%, at least about 4%, at least about 3%, at least About 2%, at least about 1%, at least about 0.9%, at least about 0.8%, at least about 0.7%, at least about 0.6%, at least about 0.5%, at least about 0.4%, at least about 0.3%, at least about 0.2%, or At least about 0.1%.

[0683] For example, the increased proportion of cells with stemness by the present invention can be the increased proportion of CD69⁻ CD39-cells and/or increased proportion of TCF1⁺ cells. For example, the proportion of cells with stemness in the cells can be increased by at least about 100-0.1%, such as at least about 100%, at least about 90%, at least about 80%, at least about 70%, at least about 60%, at least about 50%, at least about 40%, at least about 30%, at least about 20%, at least about 19%, at least about 18%, at least about 17%, at least about 16%, at least about 15%, at least about 14%, at least about 13%, at least about 12%, at least about 11%, at least about 10%, at least about 9%, at least about 8%, at least about 7%, at least about 6%, at least about 5%, at least about 4%, at least about 3%, at least about 2%, at least about 1%, at least about 0.9%, at least about 0.8%, at least about 0.7%, at least about 0.6%, at least about 0.5%, at least about 0.4%, at least about 0.3%, at least about 0.2%, or at least about 0.1%.

[0684] For example, the increased proportion of central memory cells by the present invention can be the increased proportion of CD45RA⁻ CCR7⁺ or CD45RO⁺ CD62L⁺ cells. For example, the proportion of central memory cells in the cells can be increased by at least about 100-0.1%, such as at least about 100%, at least about 90%, at least about 80%, at least about 70%, at least about 60%, at least about 50%, at least About 40%, at least about 30%, at least about 20%, at least about 19%, at least about 18%, at least about 17%, at least about 16%, at least about 15%, at least about 14%, at least about 13%, at least About 12%, at least about 11%, at least about 10%, at least about 9%, at least about 8%, at least about 7%, at least about 6%, at least about 5%, at least about 4%, at least about 3%, at least About 2%, at least about 1%, at least about 0.9%, at least about 0.8%, at least about 0.7%, at least about 0.6%, at least about 0.5%, at least about 0.4%, at least about 0.3%, at least about 0.2%, or At least about 0.1%.

[0685] For example, the increased proportion of naive T cells by the present invention can be the increased proportion of CD45RO⁻ CD62L⁺ cells. For example, the proportion of naive cells in the cells can be increased by at least about 100-0.1%, such as at least about 100%, at least about 90%, at least about 80%, at least about 70%, at least about 60%, at least about 50%, at least about 40%, at least about 30%, at least about 20%, at least about 19%, at least about 18%, at least about 17%, at least about 16%, at least about 15%, at least about 14%, at least about 13%, at least about 12%, at least about 11%, at least about 10%, at least about 9%, at least about 8%, at least about 7%, at least about 6%, at least about 5%, at least about 4%, at least about 3%, at least about 2%, at least about 1%, at least about 0.9%, at least about 0.8%, at least about 0.7%, at least about 0.6%, at least About 0.5%, at least about 0.4%, at least about 0.3%, at least about 0.2%, or at least about 0.1%.

[0686] For example, the culture method of the present invention may include a gene editing step for cells. For example, it includes: subjecting the cells to at least one stage of in vitro expansion, wherein a gene regulatory system can be introduced into the cells during at least one stage of the in vitro expansion.

[0687] For example, the gene regulation system can destroy the target gene at the DNA level. For example, the gene regulatory system can destroy the region of the gene of interest or a fragment thereof in the genome of the cell. For example, after using the gene control system, the DNA region or fragment thereof in the cell where the target gene is located is sheared, and the expression ability of the target gene is reduced or the activity of the target gene is inhibited. For example, the editing effect of the gene regulation system on the target gene can be long-term and sustained. For example, the activity of members of at least two families selected from the peptidase C64 family, the ZC3H12 family, the STAT-induced STAT inhibitor (SSI) family, and the CBL family is inhibited in the cells of the present invention.

[0688] The genomic region of the present invention is determined based on the hg38 version of the human reference genome.

[0689] For example, the activities of TNFAIP3 and ZC3H12A are inhibited in the cells of the present invention. For example, preferred subregions of TNFAIP3 and ZC3H12A are knocked out and/or inhibited in the cells shown in Tables 1A and 1B of the present invention respectively. For example, the preferred targeting subregions shown in TNFAIP3 R_1 to 30 in Table 1A of the present invention are combined with those shown in ZC3H12A R_1 to 9 in Table 1B to form a combination with combination numbers 1 to 270 that is knocked out and/or inhibited.

[0690] For example, the activities of TNFAIP3 and SOCS1 are inhibited in the cells of the present invention. For example, the preferred subtypes of TNFAIP3 and SOCS1 in the cells shown in Tables 1A and 1C of the present invention are respectively

[0691] Regions are knocked out and/or suppressed. For example, the preferred targeting subregions shown in TNFAIP3 R_1 to 30 in Table 1A of the present invention are combined with those shown in SOCS1 R_1 to 10 in Table 1C to form a combination with combination numbers 271 to 570 that is knocked out and/or inhibited.

[0692] For example, the activities of TNFAIP3 and CBLB are inhibited in the cells of the present invention. For example, preferred subregions of TNFAIP3 and CBLB are knocked out and/or inhibited in the cells shown in Tables 1A and 1D of the present invention, respectively. For example, two combinations of the preferred targeting subregions shown in TNFAIP3 R_1 to 30 in Table 1A of the present invention and CBLB R_1 to 44 in Table 1D are combined to form combination numbers 571 to 1890 that are knocked out and/or inhibited.

[0693] For example, the activities of ZC3H12A and SOCS1 are inhibited in the cells of the present invention. For example, preferred subregions of ZC3H12A and SOCS1 are knocked out and/or inhibited in the cells shown in Tables 1B and 1C of the present invention respectively. For example, the preferred targeting subregions shown in ZC3H12A R_1 to 9 in Table 1B of the present invention are combined with those shown in SOCS1 R_1 to 10 in Table 1C to form a combination with combination numbers 1891 to 1980 that is knocked out and/or inhibited.

[0694] For example, the activities of ZC3H12A and CBLB are inhibited in the cells of the present invention. For example, preferred subregions of ZC3H12A and CBLB are knocked out and/or inhibited in the cells shown in Tables 1B and 1D of the present invention, respectively. For example, the preferred targeting subregions shown in ZC3H12A R_1 to 9 in Table 1B of the present invention and CBLB R_1 to 44 in Table 1D are combined to form a combination with combination numbers 1981 to 2376 that is knocked out and/or inhibited.

[0695] For example, the activities of SOCS1 and CBLB are inhibited in the cells of the present invention. For example, preferred subregions of SOCS1 and CBLB are knocked out and/or inhibited in the cells shown in Tables 1C and 1D of the present invention, respectively. For example, the preferred targeting subregions shown in SOCS1 R_1 to 10 in Table 1C of the present invention and CBLB R_1 to 44 in Table 1D are combined to form a combination with combination numbers 2377 to 2816 that is knocked out and/or inhibited.

[0696] For example, the gene regulatory system may include guide nucleic acid molecules and enzymatic proteins. For example, the enzyme protein can have nucleic acid shearing enzyme activity, and the guide nucleic acid molecule can guide the

[0697] The enzyme protein specifically cuts the region where the target gene is located or its fragment. For example, the guide nucleic acid molecule and the enzyme protein may exist in the form of a ribonucleoprotein complex (RNP), or each may exist independently. For example, the enzyme protein may comprise Cas protein. For example, polynucleotides encoding gRNA and Cas protein can be introduced into the target cell, or each independently.

[0698] For example, reducing the expression and/or weakening the activity of at least two target genes in a cell according to the present invention may include: introducing a ribonucleoprotein complex (RNP) containing the guide nucleic acid molecule and the enzyme protein into the cell. For example, the enzyme protein may comprise Cas protein, Cas protein homologues, or functionally active fragments thereof. For example, the guide nucleic acid molecule may comprise guide RNA (gRNA). For example, a complex comprising a polynucleotide encoding a gRNA and a Cas protein can be introduced into the cell. For example, a complex containing gRNA and Cas protein can be introduced into the cell.

[0699] For example, the gRNA can be used to bind to the sequence of the gene of interest. For example, the binding of the gRNA to the sequence of the target gene may be completely complementary, partially complementary, or may hybridize to the sequence of the target gene under moderately stringent or stringent conditions. For example, the binding of the gRNA to the sequence of the target gene can cause the CRISPR system of the gRNA to specifically cleave the target gene.

[0700] For example, the editing target region of the present invention may be a region before the start codon. For example, the editing target region of the present invention may be a region with high transcription factor binding capacity. For example, the editing target region of the present invention may be a region with a specific number of transcription factor binding numbers. For example, the editing target region of the present invention can be a continuous region with a binding number of transcription factors of about 3 or more. For example, the genomic coordinates of the editing target region of the present invention can be selected from the preferred targeting subregions shown in Tables 1A to 1D.

[0701] For example, the guide nucleic acid molecule targeting TNFAIP3 of the present invention can be combined with a region selected from the following group or a fragment thereof: SEQ ID NO: 107-212, 1562-2532. For example, the ZC3H12A-targeting guide nucleic acid molecule of the present invention can be combined with a region selected from the following group or a fragment thereof: SEQ ID NO: 281-348, 3116-3698. For example, the present invention

[0702] The guide nucleic acid molecule targeting SOCS1 may be combined with a region or fragment thereof selected from the group consisting of: SEQ ID NO: 399-448, 4393-5086. For example, the guidance nucleic acid molecule targeting CBLB of the present invention can be combined with a region selected from the following group or a fragment thereof: SEQ ID NO: 520-590, 6177-7266.

[0703] For example, when the gene editing system includes CRISPR/Cas9, there may be a protospacer adjacent motif (PAM) downstream of the region targeted by the guiding nucleic acid molecule of the present invention, and the protospacer adjacent motif (PAM) may be AGG, TGG, GGG or CGG. For example, when the PAM region of the target gene is determined, those skilled in the art can easily determine about 15 to about 25 (for example, about 15, about 16, about 17, about 18, about 19, about 20) upstream of the 5′ end of the PAM of the target gene, about 21, about 22, about 23, about 24, about 25) nucleotides, and a suitable gRNA can be designed for the target sequence. For example, the guide nucleic acid molecule is capable of binding to a sequence consisting of about 15 to about 25 nucleotides upstream of the 5′ end of a protospacer adjacent motif (PAM) selected from the group consisting of: AGG, TGG, GGG, and CGG.

[0704] For example, when the gene editing system includes CRISPR/Cas12, there may be a protospacer adjacent motif (PAM) upstream of the region targeted by the guiding nucleic acid molecule of the present invention, and the protospacer adjacent motif (PAM) may be NTTN, TTYN, VTTV, TRTV, TTTV, TATV, TYCV, TNN, or NTN, where Nis A, T, C, or G, Y is T or C, Vis A, C, or G, and R is A or G. For example, when the PAM region of the target gene is determined, those skilled in the art can easily determine about 15 to about 25 (for example, about 15, about 16, about 17, about 18, about 19, about 20) downstream of the 3′ end of the PAM of the target gene, about 21, about 22, about 23, about 24, about 25) nucleotides, and a suitable gRNA can be designed for the target sequence. For example, the guide nucleic acid molecule can bind to a sequence consisting of about 15 to about 25 nucleotides downstream of the 3′ end of the protospacer adjacent motif (PAM) selected from the group consisting of: NTTN, TTYN, VTTV, TRTV, TTTV, TATV, TYCV, TNN, or NTN, where Nis A, T, C, or G, Y is T or C, Vis A, C, or G, and R is A or G.

[0705] For example, when the gene editing system of the present invention includes wild-type Cas12a (also known as Cpf1, such as AsCas12a, FnCas12a, LbCas12a, BbCas12a, CMaCas12a and OsCas12a), the upstream region of the guiding nucleic acid molecule targeting of the present invention can be selected from the following PAM sequence: NTTN, where N can be A, T, C or G. For example, when the PAM region of the target gene is determined, those skilled in the art can easily determine about 17 to about 25 (for example, about 17, about 18, about 19, about 20, about 21, about 22) downstream of the 3′ end of the PAM of the target gene, about 23, about 24, or about 25) nucleotides, and a suitable gRNA can be designed for the target sequence.

[0706] For example, when the gene editing system of the present invention includes mutant Cas12a, such as enAsCas12a (mutation sites E174R, S542R and K548R), the upstream of the region targeted by the guiding nucleic acid molecule of the present invention can have a PAM sequence selected from the following: TTYN (TTTN/TTCN), VTTV (ATTV/CTTV/GTTV), or TRTV (TATV/TGTV), where N can be A, T, C or G, Y can be T or C, V can be A, C or G, R Can be A or G. For example, when the PAM region of the target gene is determined, those skilled in the art can easily determine about 17 to about 25 (for example, about 17, about 18, about 19, about 20, about 21, about 22) downstream of the 3′ end of the PAM of the target gene, about 23, about 24, or about 25) nucleotides, and a suitable gRNA can be designed for the target sequence.

[0707] For example, when the gene editing system of the present invention includes mutant Cas12a, such as opAsCas12a (mutation sites: E174R and S542R), the upstream of the region targeted by the guiding nucleic acid molecule of the present invention can have a PAM sequence selected from the following: TTTV (TTTA, TTTC, or TTTG), where V can be A, C, or G. For example, when the PAM region of the target gene is determined, those skilled in the art can easily determine about 17 to about 25 (for example, about 17, about 18, about 19, about 20, about 21, about 22) downstream of the 3′ end of the PAM of the target gene, about 23, about 24, or about 25) nucleotides, and a suitable gRNA can be designed for the target sequence.

[0708] For example, when the gene editing system of the present invention includes mutant Cas12a, such as AsCas12a Ultra (mutation sites: M537R and F870L), the guiding nucleic acid molecule of the present invention targets

[0709] The region upstream can have a PAM sequence selected from: TTTV, TATV, or TYCV, where V can be A, C, or G, and Y can be T or C. For example, when the PAM region of the target gene is determined, those skilled in the art can easily determine about 17 to about 25 (for example, about 17, about 18, about 19, about 20, about 21, about 22) downstream of the 3′ end of the PAM of the target gene, about 23, about 24, or about 25) nucleotides, and a suitable gRNA can be designed for the target sequence.

[0710] For example, when the gene editing system of the present invention includes mutant Cas12a, such as hfCas12Max (mutation site: N243R/E336R/D892R) and Cas12Max (mutation site: N243R), the upstream region of the guiding nucleic acid molecule targeting of the present invention can be A PAM sequence selected from: TNN, or NTN, where N can be A, T, C, or G. For example, when the PAM region of the target gene is determined, those skilled in the art can easily determine about 17 to about 25 (for example, about 17, about 18, about 19, about 20, about 21, about 22) downstream of the 3′ end of the PAM of the target gene, about 23, about 24, or about 25) nucleotides, and a suitable gRNA can be designed for the target sequence.

[0711] For example, the guide nucleic acid molecule may comprise a member and/or a functionally active fragment thereof capable of binding and encoding at least 2 families selected from the group consisting of the peptidase C64 family, the ZC3H12 family, the STAT-induced STAT inhibitor (SSI) family and the CBL family. The target sequence consists of about 15 to about 25 nucleotides before the PAM region represented by AGG, TGG, GGG and/or CGG in the DNA where the gene is located. For example, the guide nucleic acid molecule may comprise a member and/or a functionally active fragment thereof capable of binding and encoding at least 2 families selected from the group consisting of the peptidase C64 family, the ZC3H12 family, the STAT-induced STAT inhibitor (SSI) family and the CBL family. In the DNA where the gene is located, there are about 15 to about 25, about 17 to about 25, about 19 to about 25, about 20 to about 25, about 21 to About 25, about 23 to about 25, about 15 to about 23, about 17 to about 23, about 19 to about 23, about 20 to about 23, about 21 to about 23, about 22 to about 23, about 15 to about 21, about 17 to about 21, about 19 to about 21, about 20 to about 21, about 15 to about 20, about 17 to about 20, about 19 to about 20 A target sequence consisting of, about 15 to about 19, about 17 to about 19, or about 15 to about 17 nucleotides. For example, target

[0712] The sequence may be selected from the region defined by the genomic coordinates shown in Tables 2A-2D or a fragment thereof. In the present invention, only for the convenience of display and limited display space, some target sequences are displayed as 2A-2D as target sequences for double knockout; however, two or two are selected from Tables 3A-3D in the present invention. The target sequences of more types of targets can be combined with each other and can also be used to double-knock or multiple-knock the target.

[0713] For example, the guide nucleic acid molecule may comprise a targeting domain of a sgRNA targeting TNFAIP3 as shown in any one of SEQ ID NOs: 1-106, 591-1561, 7267-7324, 7419, 7420, such as SEQ ID NO: The targeting domain of the sgRNA targeting ZC3H12A shown in any one of 213-280, 2533-3115, 7325-7345, 7416, and 7417, such as SEQ ID NO: 349-398, 3699-4392, 7346-7375, The targeting domain of the sgRNA targeting SOCS1 as shown in any one of 7418, or the sgRNA targeting CBLB as shown in any one of SEQ ID NOs: 449-519, 5087-6176, 7376-7413, 7414, and 7415 targeting domain.

[0714] For example, the activities of TNFAIP3 and ZC3H12A are inhibited in the cells of the present invention. For example, SEQ ID NOs: 1-106 of the present invention and the guide sequences shown in SEQ ID NOs: 213-280 are combined in pairs to form editing combination numbers 1 to 7208, which are knocked out and/or inhibited.

[0715] For example, the activities of TNFAIP3 and SOCS1 are inhibited in the cells of the present invention. For example, SEQ ID NOs: 1-106 of the present invention and the guide sequences shown in SEQ ID NOs: 349-398 are combined in pairs to form editing combination numbers 7209 to 12508, which are knocked out and/or suppressed.

[0716] For example, the activities of TNFAIP3 and CBLB are inhibited in the cells of the present invention. For example, SEQ ID NOs: 1-106 of the present invention and the guide sequences shown in SEQ ID NOs: 449-519 are combined in pairs to form editing combination numbers 12509 to 20034, which are knocked out and/or suppressed.

[0717] For example, the activities of ZC3H12A and SOCS1 are inhibited in the cells of the present invention. For example, the guide shown in SEQ ID NO: 213-280 and SEQ ID NO: 349-398 of the present invention were combined in pairs to form editing combination serial numbers 20035 to 23434, which were knocked out and/or suppressed.

[0718] For example, the activities of ZC3H12A and CBLB are inhibited in the cells of the present invention. For example, SEQ ID NOs: 213-280 of the present invention and the guide sequences shown in SEQ ID NOs: 449-519 are combined in pairs to form editing combination numbers 23435 to 28262, which are knocked out and/or inhibited.

[0719] For example, the activities of SOCS1 and CBLB are inhibited in the cells of the present invention. For example, SEQ ID NOs: 349-398 of the present invention and the guide sequences shown in SEQ ID NOs: 449-519 are combined in pairs to form editing combination numbers 28263 to 31812, which are knocked out and/or suppressed.

[0720] For example, the ratio of cells expressing the product of the target gene in cells obtained by reducing the expression and/or weakening the activity of at least two target genes in the cells compared with cells in which the expression and/or activity of the target gene is unchanged. can be reduced and/or the expression level of the target gene in a single cell can be reduced.

[0721] For example, in the method of the present invention, the target genes are expressed in cells obtained by reducing the expression and/or activity of at least two target genes in the cells compared with cells in which the expression and/or activity of the target genes are unchanged. The cell proportion of the product is reduced by at least about 5%. For example, a cell expressing the product of a gene encoding members and/or functionally active fragments of at least 2 families selected from the peptidase C64 family, the ZC3H12 family, the STAT-induced STAT inhibitor (SSI) family, and the CBL family. The proportion is reduced by at least about 100-5%, such as at least about 100%, at least about 90%, at least about 80%, at least about 70%, at least about 60%, at least about 50%, at least about 40%, at least about 30%, At least about 20%, at least about 19%, at least about 18%, at least about 17%, at least about 16%, at least about 15%, at least about 14%, at least about 13%, at least about 12%, at least about 11%, At least about 10%, at least about 9%, at least about 8%, at least about 7%, at least about 6%, or at least about 5%. For example, expression of the cellular proportion of the products of genes of at least 2 family members and/or functionally active fragments thereof of the STAT inhibitor (SSI), peptidase C64 family, the ZC3H12 family, and STAT-induced the CBL family can range from an observable cellular proportion to 1%. For example, a cell expressing the product of a gene encoding members and/or functionally active fragments of at least 2 families selected from the peptidase C64 family, the ZC3H12 family, the STAT-induced STAT inhibitor (SSI) family, and the CBL family. The ratio may be reduced to at least about 100-1%, such as at least about 100%, at least about 90%, at least about 80%, at least about 70%, at least about 60%, at least about 50%, at least about 40%, at least about 30%, at least about 20%, at least about 19%, at least about 18%, at least about 17%, at least about 16%, at least about 15%, at least about 14%, at least about 13%, at least about 12%, at least about 11%, at least about 10%, at least about 9%, at least about 8%, at least about 7%, at least about 6%, at least about 5%, or at least about 1%. For example, a cell expressing the product of a gene encoding members and/or functionally active fragments of at least 2 families selected from the peptidase C64 family, the ZC3H12 family, the STAT-induced STAT inhibitor (SSI) family, and the CBL family. The ratio can be measured by cell flow cytometry.

[0722] For example, in the method of the present invention, the expression of at least two target genes of the cells is reduced and/or the activity is weakened, and the cells expressing the genes selected from the group consisting of peptidase C64 family, ZC3H12 family, STAT-induced STAT inhibitor (SSI) are obtained. The cellular proportion of products of genes of at least 2 families in the) family and the CBL family and/or functionally active fragments thereof may be at most about 95%. For example, a cell expressing the product of a gene encoding members and/or functionally active fragments of at least 2 families selected from the peptidase C64 family, the ZC3H12 family, the STAT-induced STAT inhibitor (SSI) family, and the CBL family. The proportion of cells in the ratio may be at most about 95-5%, such as at most about 95%, at most about 90%, at most about 80%, at most about 70%, at most about 60%, at most about 50%, at most about 40%, at most About 30%, at most about 20%, at most about 19%, at most about 18%, at most about 17%, at most about 16%, at most about 15%, at most about 14%, at most about 13%, at most about 12%, at most About 11%, up to about 10%, up to about 9%, up to about 8%, up to about 7%, up to about 6%, or up to about 5%. For example, a cell expressing the product of a gene encoding members and/or functionally active fragments thereof of at least 2 families selected from the peptidase C64 family, the ZC3H12 family, the STAT-induced STAT inhibitor (SSI) family, and the CBL family. The ratio can be measured by cell flow cytometry.

[0723] For example, in the method of the present invention, compared with cells in which the expression and/or activity of the target genes are unchanged, the cells obtained by reducing the expression and/or activity of at least two target genes are described in a single cell. The expression level of the target gene can be reduced by at least about 5%. For example, the expression level of the gene of interest in a single cell can be reduced by at least about 100-5%, such as at least about 100%, at least about 90%, at least about 80%, at least about 70%, at least about 60%, at least about 50%, at least about 40%, at least about 30%, at least about 20%, at least about 19%, at least about 18%, at least about 17%, at least about 16%, at least about 15%, at least about 14%, at least about 13%, at least about 12%, at least about 11%, at least about 10%, at least about 9%, at least about 8%, at least about 7%, at least about 6%, or at least about 5%. For example, the expression level of the target gene in a single cell can range from the observable expression level to 1%. For example, the expression level of the gene of interest in a single cell can be reduced to at least about 100-1%, such as at least about 100%, at least about 90%, at least about 80%, at least about 70%, at least about 60%, at least about 50% %, at least about 40%, at least about 30%, at least about 20%, at least about 19%, at least about 18%, at least about 17%, at least about 16%, at least about 15%, at least about 14%, at least about 13%, at least about 12%, at least about 11%, at least about 10%, at least about 9%, at least about 8%, at least about 7%, at least about 6%, at least about 5%, at least about 4%, at least about 3%, at least about 2%, or at least about 1%.

[0724] For example, in the method of the present invention, the expression level of the target genes in a single cell obtained by reducing the expression and/or activity of at least two target genes in the cells can be the expression and/or activity of the target genes. At most about 95% of the cells are unchanged. For example, the genes encoding members and/or functionally active fragments thereof of at least 2 families selected from the peptidase C64 family, the ZC3H12 family, the STAT-induced STAT inhibitor (SSI) family and the CBL family in a single cell (e.g. The expression level of genes encoding TNFAIP3, ZC3H12A, SOCS1, and CBLB may be the genes encoding at least two families selected from the group consisting of the peptidase C64 family, the ZC3H12 family, the STAT-induced STAT inhibitor (SSI) family, and the CBL family, and At most about 95-5% of the cells in which the expression and/or activity of the functionally active fragments thereof is unchanged, for example, at most about 95%, at most about 90%, at most about 80%, at most about 70%, at most about 60%, At most about 50%, at most about 40%, at most about 30%, at most about 20%,

[0725] At most about 19%, at most about 18%, at most about 17%, at most about 16%, at most about 15%, at most about 14%, at most about 13%, at most about 12%, at most about 11%, at most about 10%, Up to about 9%, up to about 8%, up to about 7%, up to about 6%, or up to about 5%.

[0726] For example, the method of the present invention includes: causing the cells to undergo at least one stage of in vitro expansion, wherein in at least one stage of the in vitro expansion, the cells are selected from the group consisting of peptidase C64 family, ZC3H12 family, STAT Decreased expression and/or attenuated activity of members of at least 2 families of the induced STAT inhibitor (SSI) family and the CBL family.

[0727] For example, the TILs derived from tumor tissue, tumor-related lymph nodes with or without tumor metastasis, tumor metastasis lesions, fragments of para-cancerous tissue, pleural effusion and/or peritoneal effusion and have not been amplified in vitro are subjected to The first stage of in vitro amplification and the second stage of in vitro amplification, and in the second stage of in vitro amplification, the TILs amplified in the first stage of in vitro are selected from the group consisting of peptidase C64 family, ZC3H12 family, STAT Decreased expression and/or attenuated activity of members of at least 2 families of the induced STAT inhibitor (SSI) family and the CBL family.

[0728] For example, the first stage of in vitro expansion is performed for at least about 7 days. For example, the second stage of in vitro expansion is performed for at least about 7 days.

[0729] For example, in a single stage of in vitro expansion of the present invention, the cells can be contacted with the one or more cell activators and the cells can contain a protein selected from the group consisting of peptidase C64 family, ZC3H12 family, STAT-inducing The expression and/or activity of at least 2 members of the STAT inhibitor (SSI) family and the CBL family and/or functionally active fragments thereof is reduced. For example, the cell activator may comprise an agonist for one or more targets selected from the group consisting of: CD3, CD28, HVEM, CD40L, OX40, and 4-1BB. For example, in a single stage of the in vitro expansion, the cells of the present invention are made to contain members of at least two families selected from the peptidase C64 family, the ZC3H12 family, the STAT-induced STAT inhibitor (SSI) family, and the CBL family. Expression and/or activity is reduced and the cell is contacted with one or more cell activating agents of the invention. For example, in the first stage of in vitro amplification of the present invention, the TIL of the present invention can be selected from the group consisting of peptidase C64 family, ZC3H12 family, and STAT-induced STAT inhibitor.

[0730] The expression and/or activity of at least 2 members of the (SSI) family and the CBL family is reduced and the TIL is contacted with one or more cell activators of the invention. For example, in the second stage of in vitro amplification of the present invention, the TIL of the present invention can be selected from at least two families selected from the peptidase C64 family, the ZC3H12 family, the STAT-induced STAT inhibitor (SSI) family and the CBL family. The expression and/or activity of the TIL is reduced and the TIL is contacted with one or more cell activators of the invention. For example, in the third stage of in vitro amplification of the present invention, the TIL of the present invention can be selected from at least two families selected from the peptidase C64 family, the ZC3H12 family, the STAT-induced STAT inhibitor (SSI) family and the CBL family. The expression and/or activity of the TIL is reduced and the TIL is contacted with one or more cell activators of the invention.

[0731] For example, in a single stage of in vitro expansion, the cells of the present invention substantially simultaneously use members of at least 2 families selected from the peptidase C64 family, the ZC3H12 family, the STAT-induced STAT inhibitor (SSI) family, and the CBL family. The expression and/or activity is reduced and contact with one or more cell activators of the invention. For example, in a single stage of in vitro expansion, the cells of the present invention first express members of at least 2 families selected from the peptidase C64 family, the ZC3H12 family, the STAT-induced STAT inhibitor (SSI) family, and the CBL family. Reduction and/or activity weakening, for example, can be carried out 2-48 hours in advance, such as 2 hours in advance, 4 hours in advance, 8 hours in advance, 12 hours in advance, 24 hours in advance, or 48 hours in advance, etc., and then combined with a method of the present invention or contact with multiple cell activators. For example, in a single stage of in vitro expansion, the cells of the present invention are first contacted with one or more cell activators of the present invention, for example, 2-48 hours in advance, such as 2 hours in advance, 4 hours in advance, 8 hours in advance. hours, 12 hours in advance, 24 hours in advance, or 48 hours in advance, etc., and then use members of at least two families selected from the peptidase C64 family, the ZC3H12 family, the STAT-induced STAT inhibitor (SSI) family and the CBL family. Reduced expression and/or weakened activity.

[0732] For example, in the first stage of in vitro amplification of the present invention, the TIL of the present invention substantially simultaneously activates at least 2 families selected from the peptidase C64 family, the ZC3H12 family, the STAT-induced STAT inhibitor (SSI) family and the CBL family. The expression and/or activity of the members is reduced and contact with one or more cell activators of the invention. For example, in the second stage of in vitro amplification of the present invention, the expression and/or activity of at least 2 members of peptidase C64 family, the ZC3H12 family, the STAT-induced STAT inhibitor (SSI) family and the CBL family and/or functionally active fragments thereof is reduced and contact with one or more cell activators of the invention. For example, in the third stage of in vitro amplification of the present invention, the TIL of the present invention substantially simultaneously activates at least 2 families selected from the group consisting of the peptidase C64 family, the ZC3H12 family, the STAT-induced STAT inhibitor (SSI) family and the CBL family, the expression and/or activity of at least 2 members of peptidase C64 family, the ZC3H12 family, the STAT-induced STAT inhibitor (SSI) family and the CBL family and/or functionally active fragments thereof is reduced.

[0733] For example, the second stage of in vitro expansion of the invention is conducted for at least about 7 days. For example, the second stage in vitro amplification of the present invention can be performed for at least about 7 days, at least about 8 days, at least about 9 days, at least about 10 days, at least about 11 days, at least about 12 days, at least about 13 days, or at least About 14 days. For example, the second stage in vitro amplification of the present invention can be carried out for about 9 days to about 14 days. For example, the second stage in vitro amplification of the present invention can be carried out for about 9 days to about 14 days, about 10 days to about 14 days, About 11 days to about 14 days, about 12 days to about 14 days, about 13 days to about 14 days, about 9 days to about 13 days, about 10 days to about 13 days, about 11 days to about 13 days, about 12 days to about 13 days, about 9 days to about 12 days, about 10 days to about 12 days, about 11 days to about 12 days, or about 10 days to about 11 days. For example, the second stage of in vitro amplification of the present invention can be considered as the REP (rapid expansion protocol) stage. For example, the first stage of in vitro amplification of the present invention can be considered as the preREP stage.

[0734] For example, the first stage of in vitro expansion of the invention is conducted for at least about 7 days. For example, the second stage in vitro amplification of the present invention can be performed for at least about 7 days, at least about 8 days, at least about 9 days, at least about 10 days, at least about 11 days, at least about 12 days, at least about 13 days, or at least About 14 days. For example, the second stage in vitro amplification of the present invention can be carried out for about 9 days to about 14 days. For example, the second stage in vitro amplification of the present invention can be carried out for about 9 days to about 14 days, about 10 days to about 14 days, About 11 days to about 14 days, about 12 days to about 14 days, about 13 days to about 14 days, about 9 days to about 13 days, about 10 days to about 13 days, about 11 days to about 13 days, about 12 days to about 13 days, about 9 days to about 12 days, about 10 days to about 12 days, about 11 days to about 12 days, or about 10 days to about 11 days.

[0735] For example, the number of days during the second stage of in vitro amplification of the present invention can be calculated from the start time of the second stage of in vitro amplification. For example, when the second-stage in vitro amplification starts, it can be considered that approximately 0 hour has passed in the second-stage in vitro amplification. For example, if the second stage of in vitro amplification is carried out for about 24 hours after the start, it can be considered that the second stage of in vitro amplification is carried out for about 1 day. For example, the day on which the second stage of in vitro amplification begins can be considered to be about 0 days of the second stage of in vitro amplification. For example, the number of days for the second stage of in vitro amplification of the present invention can be calculated based on the number of days for the second stage of in vitro amplification. For example, the day after the second stage of in vitro amplification starts, it can be considered that the second stage of in vitro amplification has been carried out for about one day.

[0736] For example, the cell activator of the invention may comprise one or more selected from the group consisting of: CD80, CD86, B7-H3, 4-1BBL, CD27, CD30, CD134, B7h, CD40, LIGHT, and their functional activities fragment. For example, a cell activator of the invention may comprise an agonist for one or more targets selected from the group consisting of: CD3, CD28, HVEM, CD40L, OX40 and 4-1BB. For example, the cell activator of the invention may comprise antibodies selected from the group consisting of CD3, CD28, HVEM, CD40L, OX40 and 4-1BB and antigen-binding fragments thereof. For example, the cell activating agent of the present invention may comprise a CD3 agonist. For example, the cell activator of the present invention may include an anti-CD3 antibody and/or an antigen-binding fragment thereof, such as OKT3 from Miltenyi Biotech or SP34 from BD. For example, a cell activator of the invention may comprise a CD28 agonist. For example, the cell activator of the present invention may comprise an anti-CD28 antibody and/or an antigen-binding fragment thereof, such as Merck's 15E8.

[0737] For example, the cell activator of the present invention may comprise an anti-CD3 antibody and/or an antigen-binding fragment thereof, for example, it may comprise the light chain VL and heavy chain VH of OKT3 from Miltenyi Biotech, and it may comprise the light chain VL and heavy chain of BD's SP34. VH. For example, a cell activator of the invention may comprise a CD28 agonist. For example, the cell activator of the present invention may comprise an anti-CD28 antibody and/or an antigen-binding fragment thereof, such as the light chain VL and heavy chain VH of Merck's 15E8. For example, the cell activator of the present invention may comprise an anti-CD3 antibody and/or an antigen-binding fragment thereof, for example, it may comprise the light chain LCDR1-3 and the heavy chain HCDR1-3 of Miltenyi Biotech's OKT3, and it may comprise the light chain of BD's SP34.

[0738] LCDR1-3 and heavy chain HCDR1-3, the anti-CD3 antibody and/or antigen-binding fragment thereof of the present invention may have CD3-binding ability. For example, a cell activator of the invention may comprise a CD28 agonist. For example, the cell activator of the present invention may comprise an anti-CD28 antibody and/or an antigen-binding fragment thereof, for example, it may comprise the light chain LCDR1-3 and heavy chain HCDR1-3 of Merck's 15E8, the anti-CD28 antibody of the present invention and/or its antigen-binding fragment. Or its antigen-binding fragment may have CD28-binding ability. In the present invention, the antibody of the present invention or its antigen-binding protein comprises at least one CDR in the variable region VH of the heavy chain of the antibody and/or at least one CDR in the variable region VL of the light chain of the antibody. The CDRs of the present invention may be defined according to the IMGT nomenclature, the CDRs of the present invention may be defined according to Chothia, or the CDRs of the present invention may be defined according to Kabat.

[0739] For example, contacting a cell of the invention with one or more cell activators of the invention may comprise one or more means selected from the following group: (1) adding a cell activator of the invention to the cell of the invention in the cell culture medium; (2) adding engineered cells expressing the cell activator of the present invention to the cell culture medium of the cells of the present invention; (3) adding a solid phase medium containing the cell activator of the present invention to the cell culture medium of the present invention. cells in the cell culture medium. For example, contacting a cell of the invention with one or more cell activators of the invention may comprise adding a solid phase medium comprising a cell activator of the invention to the cell culture medium of the cells of the invention. For example, contacting a cell of the invention with one or more cell activators of the invention may comprise adding a solid phase medium comprising a CD28 antibody and a CD3 antibody of the invention to the cell culture medium of the cells of the invention.

[0740] For example, the initial concentration of the cell activator in the cell culture medium of the cells of the invention can be at least about 30 ng/ml. For example, the initial concentration of the CD28 antibody of the invention in the cell culture medium of the cells of the invention can be at least about 30 ng/ml; for example, the initial concentration of the CD3 antibody of the invention in the cell culture medium of the cells of the invention can be at least about 30 ng/mL. For example, the selection of the initial concentration of the CD28 antibody of the present invention can be independent of the selection of the initial concentration of the CD3 antibody of the present invention; for example, the initial concentration of the CD28 antibody of the present invention and the CD3 antibody of the present invention in the cell culture medium of the cells of the present invention Can be combined in any way. For example, the initial concentration of the CD28 antibody of the invention in the cell culture medium of the cells of the invention can be from about 30 ng/ml to about 300 ng/mL. For example, the initial concentration of the CD3 antibody of the present invention in the cell culture medium of the cells of the present invention can be arbitrarily selected from about 30 ng/ml to about 300 ng/mL. For example, the initial concentration of the CD28 antibody of the invention in the cell culture medium of the cells of the invention can be arbitrarily selected from about 30 ng/ml to about 300 ng/ml, and the initial concentration of the CD3 antibody of the invention in the cell culture medium of the cells of the invention The concentration can be arbitrarily selected from about 30 ng/ml to about 300 ng/ml, and the selection of the initial concentration of the CD28 antibody of the present invention can be independent of the selection of the initial concentration of the CD3 antibody of the present invention. For example, the diameter of the solid media of the present invention may range from about 500 nanometers to about 10 micrometers. For example, the diameter of the solid medium of the present invention can be measured by transmission electron microscopy. For example, the diameter of the solid media of the present invention can range from about 1 nanometer to about 500 nanometers. For example, the diameter of the solid media of the present invention can range from about 100 nanometers to about 500 nanometers. For example, the diameter of the solid media of the present invention may range from about 200 nanometers to about 500 nanometers. For example, the diameter of the solid medium of the present invention can be measured by transmission electron microscopy.

[0741] For example, the solid phase media of the present invention may contain polymers. For example, the solid phase medium of the present invention may contain dextran.

[0742] For example, the solid phase medium of the invention contains at least about 25 μg of the cell activator of the invention per mg of the solid phase medium of the invention.

[0743] For example, the solid phase medium containing the cell activator of the present invention is added to the present invention at a ratio of about 100:1 to about 1:2000, preferably about 1:100 to about 1:2000. In the cell culture medium of the invented cells. For example, the solid phase medium containing the cell activator of the invention is added to the cell culture medium of the cells of the invention at a ratio of the solid phase medium of the invention to the cells of the invention of about 2:1 to about 1:2.

[0744] For example, when the diameter of the solid phase medium of the present invention is about 100 nanometers to about 500 nanometers, the cells of the present invention can be included in a ratio of about 2:1 to about 1:2 of the solid phase medium of the present invention and the cells of the present invention. A solid medium of activator is added to the cell culture medium of the cells of the invention. For example, when the diameter of the solid phase medium of the present invention is about 100 nanometers to about 500 nanometers, it can be about 2:1 to about 1:2, about 2:1 to about 1:1, or about 1:1 to about 1:2 in the ratio of the solid phase medium of the present invention to the cells of the present invention, the activation of cells containing the present invention will be A solid phase medium of an agent, such as a CD3 agonist and/or a CD28 agonist, is added to the cell culture medium of the cells of the invention.

[0745] For example, when the diameter of the solid phase medium of the present invention is about 100 nanometers to about 500 nanometers, the cells of the present invention can be included in a ratio of the solid phase medium of the present invention to the cells of the present invention of about 1:100 to about 1:2000. A solid medium of activator is added to the cell culture medium of the cells of the invention. For example, when the diameter of the solid phase medium of the present invention is about 100 nanometers to about 500 nanometers, the ratio can be about 1:100 to about 1:2000, about 1:200 to about 1:2000, about 1:300 to about 1:300. About 1:2000, about 1:400-about 1:2000, about 1:500-about 1:2000, about 1:600-about 1:2000, about 1:700-about 1:2000, about About 1:800-about 1:2000, about 1:900-about 1:2000, about 1:1000-about 1:2000, about 1:1200-about 1:2000, about 1:1400-about 1:2000, at a ratio of about 1:1600 to about 1:2000, or at a ratio of about 1:1800 to about 1:2000 of the solid phase medium of the present invention and the cells of the present invention, for example, the CD28 agonist of the present invention and the CD3 agonist can be The solid phase medium of the agent is added to the cell culture medium of the cells of the present invention.

[0746] For example, the methods of the invention may further comprise contacting the cells of the invention with one or more cell growth factors in at least one stage of in vitro expansion of the invention.

[0747] For example, in a single stage of in vitro expansion of the invention, cells of the invention can be contacted with a cell activator of the invention and with one or more cell growth factors of the invention. For example, in the first stage of in vitro expansion of the invention, the TIL of the invention can be contacted with the cell activator of the invention and with one or more cell growth factors of the invention. For example, in the second stage of in vitro expansion of the invention, the TIL of the invention can be contacted with the cell activator of the invention and with one or more cell growth factors of the invention. For example, in the third stage of in vitro expansion of the invention, the TIL of the invention can be contacted with the cell activator of the invention and with one or more cell growth factors of the invention.

[0748] For example, in a single stage of in vitro expansion of the invention, cells of the invention are contacted with a cell activator of the invention and one or more cell growth factors of the invention substantially simultaneously. For example, in a single stage of in vitro expansion of the invention, the cells of the invention can be contacted with one or more cell growth factors of the invention and one or more cell activators of the invention substantially simultaneously. For example, in a single stage of in vitro expansion of the present invention, the cells of the present invention can be contacted with one or more cell growth factors of the present invention first, for example, 2-48 hours in advance, such as 2 hours in advance, 4 hours, 8 hours in advance, 12 hours in advance, 24 hours in advance, or 48 hours in advance, etc., and then contacted with one or more cell activators of the present invention. For example, in a single stage of in vitro expansion of the present invention, the cells of the present invention can be contacted with one or more cell activators of the present invention first, for example, 2-48 hours in advance, such as 2 hours in advance, 2 hours in advance, 4 hours, 8 hours in advance, 12 hours in advance, 24 hours in advance, or 48 hours in advance, etc., and then contacted with one or more cell growth factors of the present invention.

[0749] For example, in the first stage of in vitro expansion of the invention, the cells of the invention can be contacted with the cell activator of the invention and one or more cell growth factors of the invention substantially simultaneously. For example, in the second stage of in vitro expansion of the invention, the TIL of the invention can be contacted with the cell activator of the invention and one or more cell growth factors of the invention substantially simultaneously. For example, in the third stage of in vitro expansion of the invention, the TIL of the invention can be contacted with the cell activator of the invention and one or more cell growth factors of the invention substantially simultaneously.

[0750] For example, the cell growth factor of the present invention can be selected from one or more of the following groups: IL-2, IL-7, IL-12, IL-15, IL-21, gamma interferon, and functionally active fragments thereof. For example, the cell growth factors of the invention may comprise IL-2 and/or functionally active fragments thereof. For example, a functionally active fragment of IL-2 may comprise a fragment of IL-2 known in the art that can bind to a cell's IL-2 receptor. For example, the cell growth factors of the invention may comprise IL-2 and/or functionally active fragments thereof, IL-7 and/or functionally active fragments thereof, and IL-15 and/or functionally active fragments thereof.

[0751] For example, contacting a cell of the invention with one or more cell growth factors of the invention may comprise adding a cell growth factor of the invention to the cell culture medium of the cells of the invention. For example, the initial concentration of the cell growth factor of the invention in the cell culture medium of the cells of the invention can be at least about 300 IU/mL. For example, the initial concentration of IL-2 of the present invention in the cell culture medium of the cells of the present invention can be at least about 300-9000 IU/mL, such as at least about 300 IU/mL, at least about 350 IU/mL, at least about 400 IU/mL, at least about 500 IU/mL, at least about 600 IU/mL, at least about 700 IU/mL, at least about 800 IU/mL, at least about 900 IU/mL, at least about 1000 IU/mL, at least about 1100 IU/mL, at least about 1200 IU/mL, at least about 1300 IU/mL mL, at least about 1400 IU/mL, at least about 1500 IU/mL, at least about 2000 IU/mL, at least about 2500 IU/mL, at least about 2600 IU/mL, at least about 2700 IU/mL, at least about 2800 IU/mL, at least about 2900 IU/mL, At least about 3000 IU/mL, at least about 3100 IU/mL, at least about 3200 IU/mL, at least about 3300 IU/mL, at least about 3400 IU/mL, at least about 3500 IU/mL, at least about 4000 IU/mL, at least about 4500 IU/mL, at least about 5000 IU/mL, at least about 5500 IU/mL, at least about 6000 IU/mL, at least about 6500 IU/mL, at least about 7000 IU/mL, at least about 7500 IU/mL, at least about 8000 IU/mL, at least about 8500 IU/mL, or at least about 9000 IU/mL.

[0752] For example, when the cells of the present invention are in contact with IL-2, IL-7 and IL-15, the dosage of cytokines can be reduced compared to when they are in contact with IL-2 only. For example, adding IL-7 and IL-15 can reduce the amount of IL-2 added. For example, the concentration of IL-7 may be about 1 to 1000 ng/ml, preferably about 1 to 100 ng/ml. For example, the concentration of IL-15 may be about 1 to 1000 ng/ml, preferably about 1 to 100 ng/ml. For example, the amount of IL-2 added can be reduced to the range commonly used in the art for various immune cells, for example, to 50-10% of the range commonly used in the art, such as 50%, 20% or 10%. For example, the IL-2 addition amount of TCR-T can be in the range of 30-300 IU/mL commonly used in this field. For example, the amount of IL-2 added to TIL can range from 300 to 9000 IU/mL (for example, 1000 to 9000 IU/mL) commonly used in the field.

[0753] For example, the method of the present invention may further comprise: in at least one stage of in vitro expansion of the present invention, the cells of the present invention may be co-cultured with feeder cells.

[0754] For example, in a single stage of in vitro expansion of the invention, cells of the invention can be contacted with one or more cell activators and/or one or more cell growth factors and co-cultured with feeder cells of the invention, e.g. A single stage of in vitro amplification of the present invention may refer to the same stage

[0755] For example, the in vitro amplification of the present invention can be carried out in the first stage of the present invention, the second stage of in vitro amplification of the present invention, or the third stage of the present invention.

[0756] For example, in the first stage of in vitro expansion of the present invention, the TIL of the present invention can be contacted with one or more cell activators and/or one or more cell growth factors and co-cultured with the feeder cells of the present invention. For example, in the second stage of in vitro expansion of the present invention, the TIL of the present invention can be contacted with one or more cell activators and/or one or more cell growth factors of the present invention and with the feeder cells of the present invention. Co-culture. For example, in the third stage of in vitro expansion of the present invention, the TIL of the present invention can be contacted with one or more cell activators and/or one or more cell growth factors of the present invention and with the feeder cells of the present invention.

[0757] For example, in a single stage of in vitro expansion of the present invention, the cells of the present invention can be contacted with one or more cell activators and/or one or more cell growth factors of the present invention for a certain period of time, and then co-cultured with feeder cells of the present invention. For example, in the first stage of in vitro expansion of the present invention, the TIL of the present invention can be contacted with one or more cell activators and/or one or more cell growth factors of the present invention for a certain period of time, and then co-cultured with feeder cells of the present invention. For example, in the second stage of in vitro expansion of the present invention, the TIL of the present invention can be contacted with one or more cell activators and/or one or more cell growth factors of the present invention for a certain period of time, and then co-cultured with feeder cells the present invention. For example, in the third stage of in vitro expansion of the present invention, the TIL of the present invention can be contacted with one or more cell activators and/or one or more cell growth factors of the present invention for a certain period of time, and then co-cultured with feeder cells of the present invention.

[0758] For example, in a single stage of in vitro expansion of the present invention, the cells of the present invention can be contacted with one or more cell activators and/or one or more cell growth factors of the present invention for a certain period of time, and then co-cultured with feeder cells of the present invention. For example, a certain amount of time for the present invention may be at least about 1 hour. For example, the certain time of the present invention can be at least about 1-72 hours, such as at least about 1 hour, at least about 2 hours, at least about 3 hours, at least about 4 hours, at least about 5 hours, at least about 6 hours, at least about 7 hours, at least about 8 hours, at least about 9 hours, at least about 10 hours, at least about 11 hours, at least about 12 hours, at least about 13 hours, at least about 14 hours, at least about 15 hours, at least about 16 hours, at least about 17 hours, at least about 18 hours, at least about 19 hours, at least about 20 hours, at least about 21 hours, at least about 22 hours, at least about 23 hours, at least about 24 hours, at least about 36 hours, at least about 48 hours, at least about 60 hours, or at least about 72 hours. For example, a certain period of time in the present invention may range from about 2 hours to about 72 hours. For example, the certain time of the present invention can be about 6 hours to about 7 hours, about 6 hours to about 8 hours, about 6 hours to about 9 hours, about 6 hours to about 10 hours, about 6 hours to about 11 hours, about 6 hours to about 12 hours, about 6 hours to about 13 hours, about 6 hours to about 14 hours, about 6 hours to about 15 hours, about 6 hours to about 16 hours, about 6 hours to about 17 hours, about 6 hours to about 18 hours, about 6 hours to about 19 hours, about 6 hours to about 20 hours, about 6 hours to about 21 hours, about 6 hours to about 22 hours, about 6 hours to about 23 hours, about 6 hours to about 24 hours, about 6 hours to about 36 hours, about 6 hours to about 48 hours, about 6 hours to about 60 hours, or about 6 hours to about 72 hours. For example, the certain time of the present invention can be about 12 hours to about 13 hours, about 12 hours to about 14 hours, about 12 hours to about 15 hours, about 12 hours to about 16 hours, about 12 hours to about 17 hours, about 12 hours to about 18 hours, about 12 hours to about 19 hours, about 12 hours to about 20 hours, about 12 hours to about 21 hours, about 12 hours to about 22 hours, about 12 hours to about 23 hours, about 12 hours to about 24 hours, about 12 hours to about 36 hours, about 12 hours to about 48 hours, about 12 hours to about 60 hours, or about 12 hours to about 72 hours. For example, the certain time of the present invention can be about 1 hour, about 2 hours, about 3 hours, about 4 hours, about 5 hours, about 6 hours, about 7 hours, about 8 hours, about 9 hours, about 10 hours, about 11 hours, about 12 hours, about 13 hours, about 14 hours, about 15 hours, about 16 hours, about 17 hours, about 18 hours, about 19 hours, about 20 hours, about 21 hours, about 22 hours, about 23 hours, about 24 hours, about 36 hours, about 48 hours, about 60 hours or about 72 hours.

[0759] For example, the feeder cells of the present invention may comprise antigen-presenting cells. For example, the feeder cells of the present invention may comprise one or more selected from the group consisting of peripheral mononuclear cells, dendritic cells, and artificial antigen-presenting cells. For example, the feeder cells of the present invention may be peripheral mononuclear cells. For example, the feeder cells of the present invention may be irradiated feeder cells.

[0760] For example, the feeder cells of the present invention can be isolated artificial antigen-presenting cells (aAPC), and the artificial antigen-presenting cells of the present invention can include cells expressing HLA-A/B/C, CD64, CD80, ICOS-L and/or CD58, and can be modified to express more than one cell activator of the invention. For example, the feeder cells of the present invention can be irradiated, for example, they can be irradiated with gamma rays, or they can be irradiated with X-rays.

[0761] For example, co-culture of the cells of the present invention and the feeder cells of the present invention may include contacting the surface of the feeder cells of the present invention with the surface of the cells of the present invention. For example, co-culture of the cells of the present invention and the feeder cells of the present invention includes adding the feeder cells of the present invention to the cell culture medium of the cells of the present invention.

[0762] For example, the present invention can add the feeder cells of the present invention to the cell culture medium of the cells of the present invention at a ratio of the feeder cells of the present invention to the cells of the present invention of about 40:1 to about 400:1. For example, the present invention can be used in a ratio of about 40:1 to about 400:1, in a ratio of about 40:1 to about 300:1, in a ratio of about 40:1 to about 200:1, in a ratio of about 40:1 to about 100:1, in a ratio of about 40:1 to about 100:1. About 40:1 to about 90:1, about 40:1 to about 80:1, about 40:1 to about 70:1, about 40:1 to about 60:1, about 40:1 to about 60:1 50:1, about 50:1 to about 400:1, about 60:1 to about 400:1, about 70:1 to about 400:1, about 80:1 to about 400:1, about 90:1 to about 400:1, about 100:1 to about 400:1, about 200:1 to about 400:1, or about 300:1 to about 400:1 between the feeder cells of the present invention and the present invention The proportion of cells, the feeder cells of the invention are added to the cell culture medium of the cells of the invention.

[0763] In another aspect, the present invention provides a method for culturing tumor infiltrating lymphocytes (TIL), which may include: (A) making cells derived from tumor tissue, tumor-associated lymph nodes with or without tumor metastasis, tumor metastasis lesions, The fragments of paracancerous tissue, pleural effusion and/or peritoneal effusion and the first TIL population that has not been amplified in vitro are contacted with one or more cell growth factors; wherein the second TIL is obtained through the step (A) group; (B) reducing the expression and/or activity of members of at least two families of the second TIL group selected from the group consisting of the peptidase C64 family, the ZC3H12 family, the STAT-induced STAT inhibitor (SSI) family, and the CBL family. weaken; wherein, the third TIL group is obtained through the step (B).

[0764] In another aspect, the present invention provides a method for culturing tumor infiltrating lymphocytes (TIL), which includes: (A) making cells derived from tumor tissue, tumor-associated lymph nodes with or without tumor metastasis, tumor metastasis lesions, cancer Debris from nearby tissue, pleural effusion and/or peritoneal effusion and the first TIL population that has not been expanded in vitro are contacted with one or more T cell growth factors, wherein the second TIL is obtained through the step (A) group; (B) reducing the expression and/or activity of members of at least two families of the second TIL group selected from the group consisting of the peptidase C64 family, the ZC3H12 family, the STAT-induced STAT inhibitor (SSI) family, and the CBL family, and contacting the second TIL population with a T cell activator and/or a T cell growth factor, wherein a third TIL population is obtained through the step (B); (C) the third TIL population is contacted with a T cell activator and/or a T cell growth factor Feeder cells are co-cultured, wherein the fourth TIL population is obtained through the step (C).

[0765] In one embodiment, the first stage of in vitro amplification of the present invention can be used arbitrarily interchangeably with step (A) in the method of the above aspect. In one embodiment, the second stage in vitro amplification of the present invention can be used arbitrarily interchangeably with step (B) in the method of the above aspect. In one embodiment, the TILs amplified in vitro in the first stage of the present invention can be used arbitrarily interchangeably with the second TIL population obtained in step (A) of the above method. In one embodiment, the TILs expanded in vitro in the second stage of the present invention can be used arbitrarily interchangeably with the third TIL group obtained in step (B) of the above method. In one embodiment, if necessary, the third stage of in vitro amplification of the present invention can be used in any replacement with any additional step (C) in the method of the above aspect. In one embodiment, if necessary, the third-stage in vitro amplified TIL of the present invention can be used arbitrarily interchangeably with the fourth TIL group obtained through any additional step (C) in the above method.

[0766] In another aspect, the present invention provides a method for culturing tumor infiltrating lymphocytes (TIL), which may include: (A) making cells derived from tumor tissue, tumor-associated lymph nodes with or without tumor metastasis, and tumor metastasis lesions, fragments of paracancerous tissue, pleural effusion and/or peritoneal effusion and the first TIL population that has not been amplified in vitro are contacted with a variety of cell growth factors; wherein, the second TIL population is obtained through the step (A); (B) The second TIL population can be contacted with a variety of cell growth factors, contacted with a variety of cell activators, selected from the group consisting of the peptidase C64 family, the ZC3H12 family, the STAT-induced STAT inhibitor (SSI) family, and CBL in the family

[0767] The expression and/or activity of at least two family members is reduced, and the TIL is co-cultured with feeder cells; wherein, a third TIL population is obtained through the step (B).

[0768] In another aspect, the present invention provides a method for culturing tumor infiltrating lymphocytes (TIL), which may include: (A) making cells derived from tumor tissue, tumor-associated lymph nodes with or without tumor metastasis, and tumor metastasis lesions, fragments of paracancerous tissue, pleural effusion and/or peritoneal effusion and the first TIL population that has not been amplified in vitro are contacted with cell growth factors; wherein, the second TIL population is obtained through the step (A); (B) The second TIL population may be contacted with a cell growth factor, a cell activator, or at least two selected from the group consisting of the peptidase C64 family, the ZC3H12 family, the STAT-induced STAT inhibitor (SSI) family, and the CBL family. The expression and/or activity of family members is reduced and the TIL is co-cultured with feeder cells, at least 2 of which are selected from the group consisting of the peptidase C64 family, the ZC3H12 family, the STAT-induced STAT inhibitor (SSI) family and the CBL family. Members of the family may include TNFAIP3, ZC3H12A, SOCS1, and CBLB respectively; wherein, the third TIL group is obtained through the step (B).

[0769] In another aspect, the invention provides a method of culturing tumor-infiltrating lymphocytes (TIL). The method of obtaining TIL cells from a subject's tissue sample can be to obtain an orthotopic tumor sample or a metastatic tumor sample from the patient through surgery, and the weight can be at least about 1 g, or multiple pieces of tissue can be merged. Tumor tissue, tumor-related lymph nodes with or without tumor metastasis, tumor metastasis, fragments of adjacent tumor tissue, pleural effusion and/or peritoneal effusion in the sample transport fluid, which can be, for example, commercially used tumor tissue transport fluid, Transport in tumor tissue preservation solution or tumor tissue transport solution at approximately 2-8° C. and process within 48 hours. The tissue pieces can be mechanically broken to a size of about 1-27 cubic millimeters each, transferred into a breathable culture bag or Grex, and added with cell serum-free medium and a concentration of 300-9000 IU/mL (for example, 1000-9000 IU/mL, for example 6000 IU/mL). mL) of IL-2 for about 3-14 days. Collect the cells in the culture medium and transfer them to a breathable culture bag, or Grex, or Xuri equipment. The cell serum-free culture medium can be added with the CD28 antibody, CD3 antibody and CD28 antibody of the present invention, and magnetic beads containing CD3 antibody and CD28 antibody (such as Dynabeads) and/or a nanomatrix (eg transACT) comprising CD3 antibodies and CD28 antibodies, IL-2 at a concentration of 300-9000 IU/mL (eg 1000-9000 IU/mL, eg 6000 IU/mL) and the expression and/or activity of at least 2 members of the a peptidase C64 family, ZC3H12 family, SSI family and the CBL family is reduced (selected from peptidase C64 family members may include TNFAIP3, ZC3H12 family members may include ZC3H12A, STAT-induced STAT Inhibitor (SSI) family members may include SOCS1 and CBL family members may include CBLB, for example, by carrying a ribonucleoprotein complex (RNP) formed by the gRNA and Cas protein of the present invention, or an LNP containing gRNA and Cas protein, or the LNP containing the nucleic acid encoding gRNA and Cas protein is transduced so that the TIL encodes at least 2 families selected from the group consisting of peptidase C64 family, ZC3H12 family, STAT-induced STAT inhibitor (SSI) family and CBL family. The cell ratio of the gene of the member is about 95% or less), after activating the TIL of the present invention for a certain period of time, add irradiated PBMC (the ratio of TIL to PBMC is about 1:40 to about 1:400), and expand and culture for about 3-14 days. Cell processing systems can be used to collect cells in the culture medium, wash, freeze, and detect. The CD3 ratio of the final product can be greater than 80%, the cell survival rate can be greater than 50%, and the cells greater than 80% can be memory effector cells and effector cells. IFN-γ can be secreted after stimulation, and/or can be characterized by an increase in the proportion of activated cells.

[0770] On the one hand, the present invention provides a cell, and the cell of the present invention can be cultured according to the culture method of the present invention. In one embodiment, the cells provided by the present invention may comprise one type or a batch of cells cultured by the culture method of the present invention. In one embodiment, the cells provided by the present invention may comprise multiple or multiple batches of cells cultured by the culture method of the present invention and combined in any proportion.

[0771] In some embodiments, cells expanded using the methods of the present invention can be administered to a patient as a pharmaceutical composition. In some embodiments, the pharmaceutical composition can be a suspension of cells in a sterile buffer. Cells expanded using the PBMCs of the invention may be administered by any suitable route known in the art. In some embodiments, cells can be administered in a single intra-arterial or intravenous infusion, which can last about 30 to 60 minutes. Other suitable routes of administration may include intraperitoneal, intrathecal and intralymphatic administration.

[0772] In some embodiments, any suitable dose of cells may be administered. In some embodiments, for example when the tumor is melanoma, approximately 1×10⁹ to approximately 13.7×10¹⁰, preferably about 2.3×10⁹ to approximately 13.7×10¹⁰ cells. In some embodiments, about 1×10⁹ to approximately 12×10¹⁰ cells. In some embodiments, about 1.2×10¹⁰ to approximately 4.3×10¹⁰ cells. In some embodiments, about 3×10¹⁰ to approximately 12×10¹⁰ cells. In some embodiments, about 4×10¹⁰ to approximately 10×10¹⁰ cells. In some embodiments, about 5×10¹⁰ to approximately 8×10¹⁰ cells. In some embodiments, about 6×10¹⁰ to approximately 8×10¹⁰ cells. In some embodiments, about 7×10¹⁰ to approximately 8×10¹⁰ cells. In some embodiments, a therapeutically effective dose can be about 1×10⁹ to approximately 13.7×10¹⁰, preferably about 2.3×10⁹ to approximately 13.7×10¹⁰. In some embodiments, a therapeutically effective dose can be about 1×10⁹ to approximately 12×10¹⁰ cells. In some embodiments, the therapeutically effective dose can be about 1.2×10¹⁰ to approximately 4.3×10¹⁰ cells. In some embodiments, the therapeutically effective dose can be about 3×10¹⁰ to approximately 12×10¹⁰ cells. In some embodiments, a therapeutically effective dose can be about 4×10¹⁰ to approximately 10×10¹⁰ cells. In some embodiments, a therapeutically effective dose can be about 5×10¹⁰ to approximately 8×10¹⁰ cells. In some embodiments, a therapeutically effective dose can be about 6×10¹⁰ to approximately 8×10¹⁰ cells. In some embodiments, a therapeutically effective dose can be about 7×10¹⁰ to approximately 8×10¹⁰ cells.

[0773] In some embodiments, the number of cells provided in the compositions of the invention can be about 1×10⁶-9×10¹³, for example about 1×10⁶, about 2×10⁶, about 3×10⁶, about 4×10⁶, about 5×10⁶, about 6×10⁶, about 7×10⁶, about 8×10⁶, about 9×10⁶, about 1×10⁷, about 2×10⁷, about 3×10⁷, about 4×10⁷, about 5×10⁷, about 6×10⁷, about 7×10⁷, about 8×10⁷, about 9×10⁷, about 1×10⁸, about 2×10⁸, about 3×10⁸, about 4×10⁸, about 5×10⁸, about 6×10⁸, about 7×10⁸, about 8×10⁸, about 9×10⁸, about 1×10⁹, about 2×10⁹, about 3×10⁹, about 4×10⁹, about 5×10⁹, about 6×10⁹, about 7×10⁹, about 8×10⁹, about 9×10⁹, about 1×10¹⁰, about 2×10¹⁰, about 3×10¹⁰, about 4×10¹⁰, about 5×10¹⁰, about 6×10¹⁰, about 7×10¹⁰, about 8×10¹⁰, about 9×10¹⁰, about 1×10¹¹, about 2×10¹¹, about 3×10¹¹ about 4×10¹¹, about 5×10¹¹, about 6×10¹¹, about 7×10¹¹, about 8×10¹¹, about 9×10¹¹, about 1×10¹², about 2×10¹², about 3×10¹², about 4×10¹², about 5×10¹², about 6×10¹², about 7×10¹², about 8×10¹², about 9×10¹², about 1×10¹³, about 2×10¹³, about 3×10¹³, about 4×10¹³, about 5×10¹³, about 6×10¹³, about 7×10¹³, about 8×10¹³, or about 9×10¹³.

[0774] In some embodiments, the number of cells provided in the compositions of the invention can range from about 1×10⁶ to 5×10⁶, about 5×10⁶ to 1×10⁷, about 1×10⁷ to 5×10⁷, about 5×10⁷ to 1×10⁸, about 1×10⁸ to 5×10⁸, about 5×10⁸ to 1×10⁹, about 1×10⁹ to 5×10⁹, about 5×10⁹ to 1×10¹⁰, about 1×10¹⁰ to 5×10¹⁰, about 5×10¹⁰ to 1×10¹¹, about 5×10¹¹ to 1×10¹², about 1×10¹² to 5×10¹², about 5×10¹² to 1×10¹³, about 1×10¹³ to 5×10¹³, or about 5×10¹³ to 9×10¹³.

[0775] In some embodiments, the concentration of cells provided in the compositions of the invention can be less than about 100-0.0001% w/w, w/v or v/v of the composition, such as about 100%, about 90%, about 80%, about 70%, about 60%, about 50%, about 40%, about 30%, about 20%, about 19%, about 18%, about 17%, about 16%, about 15%, about 14%, about 13%, about 12%, about 11%, about 10%, about 9%, about 8%, about 7%, about 6%, about 5%, about 4%, about 3%, about 2%, about 1%, about 0.9%, about 0.8%, about 0.7%, about 0.6%, about 0.5%, about 0.4%, about 0.3%, about 0.2%, about 0.1%, about 0.09%, about 0.08%, about 0.07%, about 0.06%, about 0.05%, about 0.04%, about 0.03%, about 0.02%, about 0.01%, about 0.009%, about 0.008%, about 0.007%, about 0.006%, about 0.005%, about 0.004%, about 0.003%, about 0.002%, about 0.001%, about 0.0009%, about 0.0008%, about 0.0007%, about 0.0006%, about 0.0005%, about 0.0004%, about 0.0003%, about 0.0002%, or about 0.0001% w/w, w/v or v/v.

[0776] In some embodiments, the concentration of cells provided in the compositions of the invention can be greater than about 90-0.0001% w/w, w/v or v/v of the composition, such as about 90%, about 80%, about 70%, about 60%, about 50%, about 40%, about 30%, about 20%, about 19.75%, about 19.50%, about 19.25%, about 19%, about 18.75%, about 18.50%, about 18.25%, about 18%, about 17.75%, about 17.50%, about 17.25%, about 17%, about 16.75%, about 16.50%, about 16.25%, about 16%, about 15.75%, about 15.50%, about 15.25%, about 15%, about 14.75%, about 14.50%, about 14.25%, about 14%, about 13.75%, about 13.50%, about 13.25%, about 13%, about 12.75%, about 12.50%, about 12.25%, about 12%, about 11.75%, about 11.50%, about 11.25%, about 11%, about 10.75%, about 10.50%, about 10.25%, about 10%, about 9.75%, about 9.50%, about 9.25%, about 9%, about 8.75%, about 8.50%, about 8.25%, about 8%, about 7.75%, about 7.50%, about 7.25%, about 7%, about 6.75%, about 6.50%, about 6.25%, About 6%, about 5.75%, about 5.50%, about 5.25%, about 5%, about 4.75%, about 4.50%, about 4.25%, about 4%, about 3.75%, about 3.50%, about 3.25%, about 3%, about 2.75%, about 2.50%, about 2.25%, about 2%, about 1.75%, about 1.50%, about 1.25%, about 1%, about 0.9%, about 0.8%, about 0.7%, about 0.6%, About 0.5%, about 0.4%, about 0.3%, about 0.2%, about 0.1%, about 0.09%, about 0.08%, about 0.07%, about 0.06%, about 0.05%, about 0.04%, about 0.03%, about 0.02%, about 0.01%, about 0.009%, about 0.008%, about 0.007%, about 0.006%, about 0.005%, about 0.004%, about 0.003%, about 0.002%, about 0.001%, about 0.0009%, about 0.0008%, About 0.0007%, about 0.0006%, about 0.0005%, about 0.0004%, about 0.0003%, about or 0.0002%, or about 0.0001% w/w, w/v or v/v.

[0777] In some embodiments, the concentration of cells provided in the compositions of the invention may range from about 0.0001% to about 50%, from about 0.001% to about 40%, from about 0.01% to about 30%, from about 0.02% to about 0.02% of the composition. About 29%, about 0.03% to about 28%, about 0.04% to about 27%, about 0.05% to about 26%, about 0.06% to about 25%, about 0.07% to about 24%, about 0.08% to about 23%, about 0.09% to about 22%, about 0.1% to about 21%, about 0.2% to about 20%, about 0.3% to about 19%, about 0.4% to about 18%, about 0.5% to about 17%, About 0.6% to about 16%, about 0.7% to about 15%, about 0.8% to about 14%, about 0.9% to about 12%, or about 1% to about 10% w/w, w/v or v/v.

[0778] In some embodiments, the concentration of cells provided in the compositions of the invention may range from about 0.001% to about 10%, from about 0.01% to about 5%, from about 0.02% to about 4.5%, from about 0.03% to about 0.03% to about 10% of the composition. About 4%, about 0.04% to about 3.5%, about 0.05% to about 3%, about 0.06% to about 2.5%, about 0.07% to about 2%, about 0.08% to about 1.5%, about 0.09% to about 1%, or about 0.1% to about 0.9% w/w, w/v or v/v.

[0779] In some embodiments, the amount of cells provided in the compositions of the present invention may be equal to or less than about 10-0.0001 g, such as about 10 g, about 9.5 g, about 9.0 g, about 8.5 g, about 8.0 g,

[0780] About 7.5 g, about 7.0 g, about 6.5 g, about 6.0 g, about 5.5 g, about 5.0 g, about 4.5 g, about 4.0 g, about 3.5 g, about 3.0 g, about 2.5 g, about 2.0 g, about 1.5 g, about 1.0 g, about 0.95 g, about 0.9 g, about 0.85 g, about 0.8 g, about 0.75 g, about 0.7 g, about 0.65 g, about 0.6 g, about 0.55 g, about 0.5 g, about 0.45 g, About 0.4 g, about 0.35 g, about 0.3 g, about 0.25 g, about 0.2 g, about 0.15 g, about 0.1 g, about 0.09 g, about 0.08 g, about 0.07 g, about 0.06 g, about 0.05 g, about 0.04 g, about 0.03 g, about 0.02 g, about 0.01 g, about 0.009 g, about 0.008 g, about 0.007 g, about 0.006 g, about 0.005 g, about 0.004 g, about 0.003 g, about 0.002 g, about 0.001 g, About 0.0009 g, about 0.0008 g, about 0.0007 g, about 0.0006 g, about 0.0005 g, about 0.0004 g, about 0.0003 g, about 0.0002 g, or about 0.0001 g.

[0781] In some embodiments, the amount of cells provided in the compositions of the present invention can be greater than about 0.0001-10 g, such as about 0.0001 g, about 0.0002 g, about 0.0003 g, about 0.0004 g, about 0.0005 g, about 0.0006 g, about 0.0007 g, about 0.0008 g, about 0.0009 g, about 0.001 g, about 0.0015 g, about 0.002 g, about 0.0025 g, about 0.003 g, about 0.0035 g, about 0.004 g, about 0.0045 g, about 0.005 g, about 0.0055 g, About 0.006 g, about 0.0065 g, about 0.007 g, about 0.0075 g, about 0.008 g, about 0.0085 g, about 0.009 g, about 0.0095 g, about 0.01 g, about 0.015 g, about 0.02 g, about 0.025 g, about 0.03 g, about 0.035 g, about 0.04 g, about 0.045 g, about 0.05 g, about 0.055 g, about 0.06 g, about 0.065 g, about 0.07 g, about 0.075 g, about 0.08 g, about 0.085 g, about 0.09 g, About 0.095 g, about 0.1 g, about 0.15 g, about 0.2 g, about 0.25 g, about 0.3 g, about 0.35 g, about 0.4 g, about 0.45 g, about 0.5 g, about 0.55 g, about 0.6 g, about 0.65 g, about 0.7 g, about 0.75 g, about 0.8 g, about 0.85 g, about 0.9 g, about 0.95 g, about 1 g, about 1.5 g, about 2 g, about 2.5 g, about 3 g, about 3.5 g, about 4 g, About 4.5 g, about 5 g, about 5.5 g, about 6 g, about 6.5 g, about 7 g, about 7.5 g, about 8 g, about 8.5 g, about 9 g, about 9.5 g, or about 10 g.

[0782] In some embodiments, cells can be administered in a single dose. Such administration may be by injection, for example intravenously. In some embodiments, cells can be administered in multiple doses. Dosing may be once, twice, three, four, five, six, or more than six times per year. Dosing can be once monthly, once every two weeks, once a week, or once every 2 days. In some embodiments, administration of cells can be continuous.

[0783] In one aspect, the invention provides a pharmaceutical composition. In some embodiments, it may comprise a cell of the invention, and a pharmaceutically acceptable carrier.

[0784] On the one hand, the present invention provides a kit. The kit of the present invention may include cell activators, cell growth factors and/or feeder cells for the cell culture method of the present invention and instructions describing the steps of the cell culture method of the present invention. In one aspect, the invention provides a kit, which may comprise the cells of the invention and/or the pharmaceutical composition of the invention.

[0785] In one aspect, the invention provides a method of affecting the growth of cells, such as tumor cells, which may comprise administering to a subject a cell of the invention and/or a pharmaceutical composition of the invention. In some embodiments, affecting tumor growth may comprise reducing the volume of the tumor to about 99-0.1% of that before administration, such as about 99%, about 95%, about 90%, about 80%, about 70%, about 60%, About 50%, about 40%, about 30%, about 20%, about 19%, about 18%, about 17%, about 16%, about 15%, about 14%, about 13%, about 12%, about 11%, about 10%, about 9%, about 8%, about 7%, about 6%, about 5%, about 4%, about 3%, about 2%, about 1%, about 0.9%, about 0.8%, About 0.7%, about 0.6%, about 0.5%, about 0.4%, about 0.3%, about 0.2%, or about 0.1%.

[0786] In one aspect, the present invention provides the use of the cells of the present invention and/or the pharmaceutical composition of the present invention in the preparation of medicaments, and the medicaments of the present invention can be used to prevent and/or treat diseases and/or symptoms. For example, diseases and/or conditions of the present invention may include tumors. In some embodiments, the tumor of the invention is selected from solid tumors. In some embodiments, the tumor of the invention can be selected from one or more of the following groups: melanoma, ovarian cancer, cervical cancer, lung cancer, bladder cancer, breast cancer, head and neck cancer, pancreatic cancer, liver cancer, gastric cancer, tuberculosis Rectal and kidney cancer.

[0787] In one aspect, the invention provides a method for preventing and/or treating diseases and/or symptoms, which may comprise administering to a subject the cells of the invention and/or the pharmaceutical composition of the invention. For example, diseases and/or conditions of the present invention may include tumors. In some embodiments, the tumor of the invention is selected from solid tumors. In some embodiments, tumors of the invention may be selected from the group consisting of: melanoma, ovarian cancer, cervical cancer, lung cancer, bladder cancer, breast cancer, head and neck cancer, pancreatic cancer, liver cancer, stomach cancer, colorectal cancer, and kidney cancer.

[0788] In one aspect, the invention provides a TIL of the invention and/or a pharmaceutical composition of the invention, which can be used to prevent and/or treat diseases and/or symptoms. For example, diseases and/or conditions of the present invention may include tumors. In some embodiments, the tumor of the invention is selected from solid tumors. In some embodiments, the tumor of the invention can be selected from one or more of the following groups: melanoma, ovarian cancer, cervical cancer, lung cancer, bladder cancer, breast cancer, head and neck cancer, pancreatic cancer, liver cancer, gastric cancer, tuberculosis Rectal and kidney cancer.

### EXAMPLES

[0789] Without being limited by any theory, the following examples were provided solely to illustrate the methods and uses of the present invention and were not intended to limit the scope of the present invention.

### Example 1

### (I) TIL Cell Culture

### 1.1 Receipt and Processing of Tumor Tissue

### 1.1.1 Receipt of Samples

[0790] Tumor tissue and blood samples from a donor were received. The sample information was checked and recorded, and corresponding sample labels were printed.

### 1.1.2 Tissue Processing and Culture

[0791] Sample tubes and blood collection tubes were disinfected using 75% alcohol and transferred to a biological safety cabinet. PBMC cells were isolated from blood samples and cryopreserved according to the above-described manual PBMC isolation and cryopreservation procedures. A culture bottle or culture bag with a breathable surface, for example, a culture bag (Origen), was taken, and 300 mL of rewarmed complete culture medium was added. The complete culture medium was, for example, X-vivo 15 culture medium or other commercially available T cell culture media, such as those from Stem Cell, Lonza, Thermo, or Miltenyi brands. The medium could be supplemented with essential amino acids and antibiotics, and was supplemented with IL-2 at a concentration of 300-9000 IU/mL (e.g., 1000-9000 IU/mL, e.g., 6000 IU/mL). Several 10 cm Petri dishes were taken, and an appropriate amount of culture medium was added to each. Tumor tissue was removed from the sample tube using sterile ophthalmic tweezers and placed into a 10 cm Petri dish. The tissue was washed, and the Petri dish was replaced. A preliminary cutting was performed using ophthalmic scissors and ophthalmic tweezers to remove adipose tissue and necrotic tissue. Each tissue piece was further minced to a size of approximately 27 cubic millimeters. A non-suspended tumor tissue block was taken. The internal plunger was removed from a 20 mL syringe, and the syringe was connected to the culture bag. Approximately 1 g of the tissue block was transferred into the culture bag through the syringe using a pipette. The culture bag was placed into a carbon dioxide incubator for cultivation. The scissors and tweezers were cleaned, preliminarily disinfected with 75% alcohol, ultrasonically cleaned, and then sterilized, whereby a first TIL population was obtained.

### 1.2 Step (A) In Vitro Expansion and Harvesting

### 1.2.1 Step (A) In Vitro Expansion

[0792] Depending on the growth status of the cells, fluid was added, or half of the medium was replaced, every 3-7 days to ensure cell nutrition. A complete culture medium was used. The complete culture medium was, for example, X-vivo 15 culture medium or other commercially available T cell culture media, such as those from Stem Cell, Lonza, Thermo, or Miltenyi brands. The medium could be supplemented with essential amino acids and antibiotics, and was supplemented with IL-2 (Shuanglu and/or Sihuan) at a concentration of 300-9000 IU/mL (e.g., 1000-9000 IU/mL, e.g., 6000 IU/mL). On days 3-14 of step (A), for example, on day 13 or 14, samples were taken for cell counting. If the cell count was between 5×10⁵ and 5×10⁸ cells, the process proceeded to the harvesting step of step (A).

1.2.2 Harvesting from Step (A)

[0793] Cells at the end of the in vitro expansion in step (A) were collected and centrifuged, and the culture medium was discarded. The cells were washed once with PBS or physiological saline to obtain TILs expanded in vitro in step (A) (referred to as the second TIL population). A sample was taken for cell counting, and approximately 5×10⁵ to 2×10⁸ cells were reserved for subsequent in vitro expansion steps. Approximately 5×10⁵ cells were used for quality control testing. The remaining cells were added to a cryopreservation solution and cryopreserved as preREP TIL in vitro cells.

### 1.3 Step (B) TIL Activation

[0794] The TILs (second TIL population) expanded in vitro in step (A) were further cultured, or the cryopreserved preREP TIL in vitro cells were thawed (cell recovery was performed), for TIL activation in step (B). A complete culture medium was used. The complete culture medium was, for example, X-vivo 15 culture medium or other commercially available T cell culture media, such as those from Stem Cell, Lonza, Thermo, or Miltenyi brands, and could be supplemented with essential amino acids and antibiotics. The cell density was adjusted to 5×10⁵ to 2×10⁶ cells/mL in a 24-well suspension culture plate, at 1 mL/well, and IL-2 was added to a concentration of 300-9000 IU/mL (e.g., 1000-9000 IU/mL, e.g., 6000 IU/mL). T cell activators were also added to the culture medium of each TIL cell population; for example, a CD3 agonist and/or a CD28 agonist were added, such as approximately 30 ng/ml of CD3 antibody (Miltenyi Biotech, OKT3), and approximately 30 ng/mL of CD28 antibody (Merck, 15E8). Magnetic beads (Dynabeads, diameter approximately 1 to 10 μm, Thermo Fisher) were added at a ratio of magnetic beads to TILs of approximately 1:2 to 2:1, and/or TransAct (Miltenyi, diameter approximately 100 to 500 nm) was added at a ratio of TransAct to TILs of approximately 1:100 to 1:2000. After culturing for approximately 0-4 days, a third TIL population was obtained.

### 1.4 Step (C) TIL Cell Gene Editing

[0795] sgRNAs targeting various target sites, selected according to the present invention, were synthesized, thawed, and nuclease-free water was added to prepare a concentration of approximately 100 μM. Approximately 2 μL of gRNA (50 μM) was incubated at 95° C. for 2 minutes for annealing and then added to P3 buffer. Subsequently, 0.3-1 μL of Cas9 (e.g., KAIKA, CUREBIO, or Acro, 10 mg/mL) was added, and the mixture was incubated at 25° C. for 10 minutes to form a ribonucleoprotein (RNP) complex. In P3 buffer (Lonza), approximately 1×106 cells from the third TIL population were electroporated with the aforementioned RNP complex using a Lonza electroporator. For example, the electroporation program used was human T cell stim (EO115). The cells were cultured for approximately 0-4 days after gene editing by electroporation, yielding a fourth TIL population.

1.5 Step (D) Culture of TIL Cells after Gene Editing

[0796] Feeder cells (irradiated healthy donor PBMC T cells) were added to the fourth TIL cell population for culture. The contact between TILs and feeder cells was initiated at a time In after the TILs from step (B) were exposed to IL-2 and T cell activators (wherein Tn could range from 0 hours to 12 days, e.g., 24 hours or 48 hours). First, feeder cells, which were a mixture from 1-5 donors, were thawed. The activated TIL cells and feeder cells were mixed at a TIL cell to feeder cell ratio of approximately 1:200 and transferred into G-Rex100 culture flasks or breathable bags. Complete culture medium was added. Samples were taken for cell counting every 1-3 days, and medium was replenished or half of the medium was replaced according to the cell status, until the total cell number exceeded 1×10⁹ or the in vitro expansion culture of step (D) had been performed for approximately 5 to 14 days. The in vitro expansion culture of step (D) was then terminated.

### 1.6 Harvest of Tumor-Infiltrating Lymphocytes

[0797] Cells expanded in step (D) were taken and centrifuged, and the culture supernatant was discarded. The cells were washed three times with PBS, physiological saline, or a compound electrolyte solution to obtain TILs expanded in step (D) (fifth TIL population). During the third wash, a sample was taken for cell counting. Based on the counting results, the supernatant was discarded after a final centrifugation, and 3×106 cells were sent for quality control testing. All remaining cells were added to a cryopreservation solution, and the cell density was adjusted to 1-3×10⁸ cells/mL for cryopreservation.

### (II) TCR-T Cell Culture

### T Cell Activation:

[0798] T cells cryopreserved in liquid nitrogen were thawed and cultured. The cells were centrifuged and resuspended in T cell culture medium RPMI 1640 (Gibco) supplemented with 10% FBS (Bovogen) to a density of 5×10⁵ cells/mL. T cell TransAct (Miltenyi) was added at a 1:100 dilution, and recombinant human IL-2 was added to a concentration of 30 IU/mL. The cells were then cultured for approximately 72 hours.

### TCR Transduction:

[0799] One day prior to transduction, 24-well suspension culture plates were coated with recombinant human fibronectin fragment (Retronectin, Takara) at a final concentration of 15 μg/mL, using 250 μL per well. The plates were protected from light and stored overnight at 4° C. The coated 24-well plates were taken out, the coating solution was aspirated and discarded, and 500 μL of blocking solution containing 2% BSA was added to each well for blocking at room temperature for 30 minutes. The blocking solution was aspirated and discarded. The plate was washed twice with 500 μL/well of washing solution containing 2.5% HEPES, and the washing solution was aspirated and discarded after each wash. The experimental group was transduced with a retrovirus carrying specific TCR nucleic acid fragments of an NY-ESO-1 antigen peptide. 0.1 to 1 mL of retrovirus solution was added to each well, and the plate was centrifuged at 32° C. and 2000 g for 2 hours. The supernatant was discarded from the 24-well plate, and thawed and activated T cells were added to each well at a volume of 500-1000 μL and a cell concentration of approximately 5×10⁵ cells/mL. The plate was centrifuged at 30-32° C. and 1000 g for 10 minutes. After centrifugation, the culture plate was placed in a 37° C., 5% CO₂ incubator for cultivation, yielding transduced cells. The cells were cultured for approximately 0-4 days after transduction to obtain a TCR-T cell population. After transduction, cell count, density, and viability were monitored every 1 to 3 days. Based on the count results, T cell culture medium was added, recombinant human IL-2 was added to a concentration of 30 to 100 IU/mL, and the initial culture cell density was adjusted to 0.5-2×10⁶ cells/mL. Cultivation was continued.

### TCR-T Gene Editing:

[0800] sgRNAs targeting various target sites, selected according to the present invention, were synthesized, thawed, and nuclease-free water was added to prepare a concentration of approximately 100 μM. Approximately 2 μL of gRNA (50 μM) was incubated at 95° C. for 2 minutes for annealing and then added to P3 buffer. Subsequently, 0.3-1 μL of Cas9 (e.g., KAIKA, CUREBIO, Acro, 10 mg/mL) was added, and the mixture was incubated at 25° C. for 10 minutes to form a ribonucleoprotein (RNP) complex. Approximately 1×10⁶ TCR-T cells were electroporated with the aforementioned RNP complex in P3 buffer (Lonza) using a Lonza electroporator. For example, the electroporation program used was human T cell stim (EO115). Recombinant human IL-2 was added to the electroporated T cells to a concentration of 100-300 IU/mL, and cultivation was continued to obtain the target gene-edited TCR-T cells of the present invention.

### (III) Knockout Efficiency Detection

[0801] The following reagents and materials were used for detecting the knockout efficiency of cells: DNA extraction solution (QuickExtract DNA extraction solution, Lucigen, QE09050), nuclease-free water (RNase/DNase free water, Tiangen), EDTA (Sangon, 0.5M), and Recombinant DNase I (RNase-free, TAKARA).

### Genomic DNA Extraction:

[0802] Approximately 2-7 days after T cell knockout (performed according to the gene editing method in step 1.4 of Example 1 (I) or the TCR-T gene editing method of Example 1 (II)), approximately 1×10⁵ to 2×10⁵ cells were taken. The cells were washed once with PBS, then resuspended in 44 μL of PBS. A 6 μL nuclease mixture (containing 1 μL DNase I and 5 μL 10× DNase I Buffer) was added, and the cells were incubated at 37° C. for 5 minutes. 2.5 μL of 0.5 M EDTA was added to the sample, which was then incubated at 80° C. for 10 minutes. After centrifugation and discarding the supernatant, 50 μL of DNA extraction solution was added to the cell pellet. After a brief centrifugation, the following program was run: 75° C. for 10 minutes; 95° C. for 5 minutes; maintained at 4° C. The DNA sample concentration was determined using a spectrophotometer (NanoDrop™).

### Sequencing:

[0803] PCR primers were designed for a region approximately 100 to 200 nucleotides upstream and downstream of the PAM site. The PCR reaction system was designed as follows:

| Reagent | Volume | |
|---|---|---|
| 2 × PCR Premix Buffer | 25 | μL |
| DNA template | about 100-500 ng | |
| forward primer (10 μM) | 1 | μL |
| reverse primer (10 μM) | 1 | μL |
| ddH₂O | Add to final volume of 50 μL | |
| DMSO | 1.5 | μL |

[0804] Amplification was performed using the following PCR program:

| | |
|---|---|
| Humidity | time |

| | | | | |
|---|---|---|---|---|
| 95° | C. | 4 | min | |
| 95° | C. | 15 | sec | repeat for |
| 58° | C. | 30 | sec | 35 cycles |
| 72° | C. | 30 | sec | |
| 72° | C. | 7 | min | |

| | | |
|---|---|---|
| 4° | C. | hold |

[0805] The PCR products were subjected to Sanger sequencing analysis.

### Analysis of CRISPR-Cas9 Knockout Efficiency

[0806] The CRISPR-Cas9 knockout efficiency was analyzed based on Sanger sequencing data using the Tracking of Indels by DEcomposition (TIDE) method (see, e.g., Brinkman et al., Nucl. Acids Res. (2014) or shinyapps.datacurators.nl/tide/for specific methods). The knockout efficiency analysis was performed by inputting the corresponding sgRNA sequence of the present invention, the control sequence before knockout, and the test sequence after CRISPR-Cas9 knockout, with the p-value threshold set to 0.001.

### (IV) Expansion Detection

### Experimental Preparation

[0807] On days 7-10 after gene editing as described in Example 1 (I), the proliferation of TIL cells was assessed (IL-2 was withdrawn), and TIL cells from each group were harvested. Alternatively, TCR-transduced T cells obtained as described in Example 1 (II) were used. The cells were washed once with PBS and resuspended in T cell culture medium (without IL-2). After counting, the cell density was adjusted to 1×10⁵ to 2×10⁶ cells/mL, and 100 μL/well was added to a flat-bottomed 96-well plate. For the no-stimulation medium group, no cell activating substances were added to the medium. For the CD3 antibody stimulation group, CD3 antibody (OKT3) was added at 30 ng/mL for stimulation. For the TransAct stimulation group, TransAct (diameter approximately 100 to 500 nm, Miltenyi) was added to achieve a working solution concentration of 1:1000 (v/v). For the Medium group, only an equivalent volume of cell culture medium was added. The fluorescence amount of T cells at the time of plating was analyzed using a CTG kit (CellTiter-Glo Luminescent Cell Viability Assay, Promega). After 3 days, the fluorescence amount of T cells was again analyzed using the CTG kit. The T cell expansion efficiency was characterized by the ratio of fluorescence amount on day 3 to the fluorescence amount at plating.

### (V) Cell Killing Ability Test

[0808] Beginning on the 6th day after gene editing, tumor target cells were plated in a 96-well flat-bottomed plate. On the next day, TIL cells from each group were co-cultured with target cells at different effector-to-target ratios (T cells: target cells, E:T). Alternatively, TCR-transduced T cells obtained as described in Example 1 (II) were used. 100 μL each of target cells and T cells were used, with three replicate wells set for each group. A control group containing only target cells was also set. The target cells could be selected from Hey-T30 ovarian cancer cells and A375 melanoma cells. According to the instructions of the apoptosis detection reagent (Incucyte Caspase-3/7 Green Dye for Apoptosis, Sartorius), the apoptosis detection reagent was added at 0.2 L/well, and Caspase 3/7 Green Dye was diluted with culture medium and added at 25 μL/well. The activity of Caspase 3/7 was recorded using an Incucyte live-cell analysis system (Sartorius) to analyze the killing ability of TIL cells against target cells. Recordings were performed every 3 hours for a total recording time of approximately 5 days.

### (VI) Cell Killing Ability Test (Flow Cytometry)

[0809] Flow cytometry was used to detect the expression of T cell exhaustion, stemness, and other related molecules in the TIL cells obtained on the 8th day after gene editing. Alternatively, TCR-transduced T cells obtained in Example 1 (II) were detected. V-bottom 96-well plates (Corning, Cat. No. 3894) and flow cytometry tubes (Corning, Cat. No. 352052) were used. Flow cytometry antibodies were purchased from BD Biosciences or BioLegend.

### Cell Surface Molecule Detection:

[0810] For each group, 1×105 to 5×105 cell samples were added to flow cytometry tubes or V-bottom 96-well plates. The samples were centrifuged at 600 g for 3 minutes, and the supernatant was discarded. Cells were washed once with PBS (1 mL/tube for flow cytometry tubes, 200 μL/well for 96-well plates), and the supernatant was discarded. Prepared antibody working solution was added for cell surface staining. The antibody (BD Biosciences or BioLegend) concentration was 1:100 to 1:200, containing viability dye at 1:10000. Staining was performed with 100 μL/tube for flow cytometry tubes or 50 μL/well for 96-well plates, and incubated at 2-8° C. in the dark for 30 minutes. After surface staining, cells were washed once with PBS (200 μL/wash for 96-well plates, 1 mL/wash for flow cytometry tubes), centrifuged at 600 g for 3 minutes at room temperature, and the supernatant was discarded. Cells were resuspended in 100-500 μL PBS for flow cytometry analysis.

### Intracellular Molecule Detection:

[0811] An antibody mixture working solution was prepared for cell surface staining of CD3/CD4/CD8 (antibody concentration 1:100), with cell viability dye at a concentration of 1:10000. Staining was performed with 50 μL/well for 96-well plates or 100 μL/tube for flow cytometry tubes, and incubated at 2-8° C. in the dark for 30 minutes. Cells were washed once with PBS (200 μL/wash for 96-well plates, 1 mL/wash for flow cytometry tubes), centrifuged at 600 g for 3 minutes at room temperature, and the supernatant was discarded. 100 μL of Fixation/Permeabilization solution (BD Biosciences) was added to each well, and incubated at 2-8° C. in the dark for 20-40 minutes. After fixation and permeabilization, cells were washed twice with 1× Perm/Wash Buffer (200 μL/wash for 96-well plates, 1 mL/wash for flow cytometry tubes), centrifuged at 600 g for 3 minutes, and the supernatant was discarded. Intracellular molecular antibodies (e.g., TCF1) were prepared using 1× Perm/Wash Buffer, and TIL cells were resuspended (50 μL/well for 96-well plates, 100 μL/tube for flow cytometry tubes for staining), and incubated at 2-8° C. in the dark for 30 minutes. After intracellular molecular staining, cells were washed 1-2 times with 1× Perm/Wash Buffer (200 μL/wash for 96-well plates, 1 mL/wash for flow cytometry tubes), centrifuged at 600 g for 3 minutes, and the supernatant was discarded. Cells were resuspended in 100-500 μL PBS for flow cytometry analysis.

### (VII) Cytokine Expression Flow Cytometry Detection

[0812] The TIL cell populations obtained on the 7th or 8th day after gene editing in each experimental group were subjected to flow cytometry to detect cytokine expression. Alternatively, TCR-transduced T cells obtained in Example 1 (II) were detected. Culture medium required for intracellular cytokine expression detection was prepared: TIL cell culture medium was taken, and Golgistop (0.7:1000 v/v), Golgiplug (1:1000 v/v), and CD107a antibody (1:500 v/v, i.e., 2 μL/mL) were added according to volume ratio. No interleukins were added.

### Detection Steps:

[0813] T cells from each experimental group were centrifuged, and then resuspended using the aforementioned culture medium required for intracellular cytokine expression detection. After counting, the cell density was adjusted to 1×106 cells/mL, and 200 μL/well was added to a 96-well plate. For the CD3 antibody stimulation group, CD3 antibody (OKT3) was added at 30 ng/ml for stimulation. For the TransAct stimulation group, TransAct (diameter approximately 100 to 500 nm, Miltenyi) was added to make the TransAct working solution concentration 1:1000 (v/v). For the Medium group, only an equivalent volume of cell culture medium was added. The plate was placed in a 37° C. incubator and incubated overnight. Sources of main reagents and materials for cytokine flow detection tests: V-bottom 96-well plates (Corning, Cat. No. 3894); flow cytometry tubes (Corning, Cat. No. 352052); flow cytometry antibodies were purchased from BD Biosciences or BioLegend. After incubation, cells were washed once with 200 μL/well PBS, centrifuged at 600 g for 3 minutes, and the supernatant was discarded. An antibody mixture working solution was prepared for cell surface staining of CD3/CD4/CD8 (antibody concentration 1:100), with cell viability dye at a concentration of 1:10000. Staining was performed with 50 μL/well for 96-well plates or 100 μL/tube for flow cytometry tubes, and incubated at 2-8° C. in the dark for 30 minutes. Cells were washed once with PBS (200 μL/wash for 96-well plates, 1 mL/wash for flow cytometry tubes), centrifuged at 600 g for 3 minutes at room temperature, and the supernatant was discarded. 100 μL of Fixation/Permeabilization solution (BD Biosciences) was added to each well, and incubated at 2-8° C. in the dark for 20-40 minutes. After fixation and permeabilization, cells were washed twice with 1× Perm/Wash Buffer (200 μL/wash for 96-well plates, 1 mL/wash for flow cytometry tubes), centrifuged at 600 g for 3 minutes, and the supernatant was discarded. Cytokine detection antibodies (e.g., GZMB, TNF-α, IFN-γ) were prepared using 1× Perm/Wash Buffer, and TIL cells were resuspended (50 μL/well for 96-well plates, 100 μL/tube for flow cytometry tubes for staining), and incubated at 2-8° C. in the dark for 30 minutes. After cytokine staining, cells were washed 1-2 times with 1× Perm/Wash Buffer (200 μL/wash for 96-well plates, 1 mL/wash for flow cytometry tubes), centrifuged at 600 g for 3 minutes, and the supernatant was discarded. Cells were resuspended in 100-500 μL PBS for flow cytometry analysis.

### (VIII) Cell Apoptosis Detection

[0814] The TIL populations obtained on the 7th or 8th day after gene editing in each experimental group in Example 1 were subjected to apoptosis detection. Alternatively, TCR-transduced T cells obtained in Example 1 (II) were detected. T cell apoptosis levels in TILs from the gene knockout group or the control group (NT, no treatment) were detected using an apoptosis detection kit (BD 559763 Annexin V PE Apoptosis kit).

### (IX) PDO Model Culture

[0815] Tumor tissue was obtained from surgery, transported and stored at 2 to 8° C. after removal, and mechanically dissociated within 24 hours. The tissue was minced to approximately 0.5 mm³ in size, then digested with a special tissue digestion solution (bioGenous) at 37° C., after which the reaction was terminated using 10% FBS. The tissue suspension was filtered through a 100 μm filter and washed, then placed on ice and thoroughly mixed with Matrigel. The mixture was then spotted onto the bottom of a cell culture plate. The culture plate was placed in a 37° C. incubator. After the Matrigel had fully solidified, complete culture medium was carefully added for cultivation. When the organoids grew to sufficient size and density, they were passaged or cryopreserved to obtain a PDO (Patient-Derived Organoid) model. The Matrigel and organoid mixture was scraped off using a pipette tip and transferred to a centrifuge tube containing basal culture medium. The mixture was pipetted to separate the organoids and Matrigel. After centrifugation, passaging tissue digestion solution was added, mixed well, and placed in a 37° C. incubator for digestion. Basal culture medium was added to dilute the digestion solution, followed by centrifugation and washing. A small amount of cell suspension was taken, and 8 times its volume of digestion solution was added to digest it into single cells. FBS was used to terminate the reaction, followed by counting. Based on the counting result, the required volume of organoids was taken, centrifuged, and resuspended in T cell culture medium. The cells to be tested (e.g., TIL cells or TCR-T cells) were counted, and resuspended to the required density according to different effector-to-target ratios. In a flat-bottomed 96-well plate, 100 μL each of PDO target cells and cells to be tested were added, with three replicate wells set for each group, for PDO co-culture detection. Several different effector-to-target ratios were set. Simultaneously, a group containing only PDO target cells was set, and a control group (NT) was set for co-culturing unedited cells to be tested only with PDO target cells.

### Detection of Killing Ability in PDO Model

[0816] A PDO model was prepared according to the embodiments of the present invention and co-cultured with TIL cells or TCR-T cells. Caspase-3/7 substrate was added for apoptosis signal labeling, and then the experimental plate was placed in an Incucyte system for observation and recording.

### (X) Multi-Round Cell Killing Ability Detection

[0817] Changes in the fluorescence intensity of target cells A375-GFP during multiple rounds of killing were monitored using an IncuCyte system. A375-GFP cells were evenly plated in a multi-well plate. After culturing at 37° C. for 4 hours, unedited cells or cells with the target of the present invention knocked out were taken. After adding to the corresponding wells, GFP fluorescence signal recording was started with the IncuCyte system, with 3 replicate wells in each group. After 24 hours of killing, the co-culture supernatant (20 μL/well) was taken for CBA detection. After 3 days of killing, a new multi-well plate evenly plated with fresh A375-GFP cells was used. After culturing at 37° C. for 4 hours, the mixture of unedited cells or cells with the target of the present invention knocked out from the previous round of killing and A375-GFP cells was transferred to the new 96-well plate. The IncuCyte system was used to record the change curve of GFP fluorescence signal in the new round of killing.

### (XI) CBA Method for Detecting Cytokine Release

[0818] Gene-edited cells were co-cultured with autologous tumor cells. The co-culture supernatant was collected, and a CBA kit (BD Biosciences) was used to detect the cytokine release from unedited cells or cells with the target of the present invention knocked out.

### (XII) In Vivo Efficacy Testing of Gene-Edited Cells

[0819] Tumor tissue samples were obtained from surgery and transferred to the laboratory under sterile conditions. Tumor necrotic tissue was removed on a sterile clean bench, and the tumor tissue was cut into 1-2 mm³ pieces. A small amount of Matrigel was added to the cut tumor tissue, which was then subcutaneously inoculated into NOG mice (Vital River, strain code 408) in an SPF animal facility. Each mouse was inoculated with 4-5 pieces of tissue. This batch of tumor tissue was designated as F0 generation. When the F0 generation tumor tissue grew to 800 mm³ under the skin of the mice, the F0 tumor tissue was surgically removed. The tumor tissue was again divided into 1-2 mm³ pieces; some were cryopreserved for later use, and some were subcutaneously inoculated into a second batch of NOG mice and continued to be passaged and expanded in the mice. This batch of tumor tissue was designated as F1 generation. This process was repeated until the tumor tissue was passaged to the F3 generation in mice. The tumor tissue size was measured regularly until the tumor volume grew to approximately 100 mm³, after which the mice were randomly grouped. Mice in the NT group were intravenously injected with unedited cells, and mice in the experimental group were intravenously injected with gene-edited cells of the present invention. The sequences of sgRNAs (single guide RNAs, or guides) targeting each target site were synthesized according to the sequences provided by the present invention. The region targeting each target could be selected from: the exon region of the target gene, an intron region approximately 100 bp or approximately 20 bp away from the exon of the target gene, and a region approximately 1500 bp upstream of the start codon of the target gene. When the region targeting each target was selected from the region approximately 1500 bp upstream of the start codon of the target gene, FIGS. 1A-1D show a continuous region provided by the present invention upstream of the start codon that has approximately 3 or more transcription factor binding sites (as indicated by the black line segment where the ordinate is 3 or above). The present invention also provided sgRNAs targeting the exon region of each target, or an intron region approximately 100 bp or approximately 20 bp away from the exon of the target gene, which, after knockout, enhanced cell function. Preferably, the sgRNA numbering information in the examples was as follows:

| sgRNA No. | sgRNA sequence | Target genomic region | SEQ ID NO: |
|---|---|---|---|
| TP-P1 | ACAAAGACAGTCTAACCGTG | chr6: 137868162-137868189 | 7267 |
| TP-P2 | TAGACCTTGCAGAAGCGCTG | chr6: 137867909-137867936 | 7268 |
| TP-P3 | ACCCGCATACAACTGAAACG | chr6: 137867218-137867245 | 7269 |
| TP-P4 | AAATGCCCAGGTGACTCACG | chr6: 137866958-137866985 | 7270 |
| TP-P5 | GAGGAGAACCGAAAACAAAG | chr6: 137868271-137868298 | 7271 |
| TP-P6 | GTACCTGTTGCTGACAGACA | chr6: 137870886-137870913 | 7272 |
| TP-P7 | AAATCCAGTGCTGTTCAGGG | chr6: 137870822-137870849 | 7273 |
| TP-P8 | CTGTTGCTGACAGACAGGGT | chr6: 137870890-137870917 | 7274 |
| TP-P9 | AGAGTGGGTACTGAGGAGGA | chr6: 137870954-137870981 | 7275 |
| TP-P10 | CCAGTGTGAGTTAATCTCTG | chr6: 137871028-137871055 | 7276 |
| TP-P11 | GTAATGACAAGATCAAACAC | chr6: 137871104-137871131 | 7277 |
| TP-P12 | TTGTCATTACCCTGATCTGT | chr6: 137871096-137871123 | 7278 |
| TP-P13 | GCAGGCGGGAGCTATCACCC | chr6: 137871552-137871579 | 7279 |
| TP-P14 | CTGCATGTAAGACCCAGCAA | chr6: 137874780-137874807 | 7280 |
| TP-P16 | TCTGTTAGTAGATAATTAGG | chr6: 137875046-137875073 | 7281 |
| TP-P17 | CAGAATGACTTTTTAGTACA | chr6: 137875615-137875642 | 7282 |
| TP-P18 | TTCATCATTCCAGTTCTAAG | chr6: 137875680-137875707 | 7283 |
| TP-P19 | AATTCCACCCACTTTCAAAG | chr6: 137876035-137876062 | 7284 |
| TP-P20 | TTCGCCCCTTTGAAAGTGGG | chr6: 137876026-137876053 | 7285 |
| TP-P21 | CCACTTGTTAACAGAGACCG | chr6: 137877085-137877112 | 7286 |
| TP-P22 | TGATGAGATGAGTTGTGCCA | chr6: 137877224-137877251 | 7287 |
| TP-P23 | AAGACAGTTACAGATGACAC | chr6: 137877282-137877309 | 7288 |
| TP-P24 | GGGGCACGCCCAGAATCCCA | chr6: 137878538-137878565 | 7289 |
| TP-P25 | GGTGTTCACAGACATGAAGA | chr6: 137878623-137878650 | 7290 |
| TP-P26 | CGTGAAGTTGCCGGGCGTTG | chr6: 137878939-137878966 | 7291 |
| TP-P27 | GTTCCAAGTCAGATCCCTCG | chr6: 137879125-137879152 | 7292 |
| TP-P28 | CTTCAAAAGGACTACAGCAG | chr6: 137879057-137879084 | 7293 |
| TP-P29 | GGGCGTCGTTTCCAGCTCTG | chr6: 137879182-137879209 | 7294 |
| TP-P30 | CCTCCCTGTGCAACGCATGG | chr6: 137866305-137866332 | 7295 |
| TP-P31 | GAAAACAAACGTGAGTGAAG | chr6: 137879337-137879364 | 7296 |
| TP-P32 | TAGATTTTGCTGCTGCCTCA | chr6: 137880063-137880090 | 7297 |
| TP-P33 | TCAGAATCAGAGATTTCATG | chr6: 137880202-137880229 | 7298 |
| TP-P34 | TTCAAACATGGTGCTTCCAA | chr6: 137880155-137880182 | 7299 |
| TP-P35 | AAAAGCATCGAACACACGGG | chr6: 137880280-137880307 | 7300 |
| TP-P36 | GAACCACACAAAGCACCTCA | chr6: 137881058-137881085 | 7301 |
| TP-P37 | ATGGCTAACCGGAAACAGGT | chr6: 137881307-137881334 | 7302 |
| TP-P38 | GCGCTGGCTCGATCTCTGAG | chr6: 137881027-137881054 | 7303 |
| TP-P39 | AACCCGGGAGTGTTCCCAGG | chr6: 137881483-137881510 | 7304 |
| TP-P40 | TGAAGCAGTCCTGATGCGCA | chr6: 137881646-137881673 | 7305 |
| TP-P41 | GAAAAGACACACAAGTCGCG | chr6: 137881683-137881710 | 7306 |
| TP-P42 | GCCAGATCCTCATGGCAGCG | chr6: 137881764-137881791 | 7307 |
| TP-P43 | CCTGCCCGGTTCCTTTCCTG | chr6: 137881865-137881892 | 7308 |
| TP-P44 | CTGATAATCAGTTCACCCCA | chr6: 137866369-137866396 | 7309 |
| TP-P45 | AAATCGCTTCTAGTCCATCA | chr6: 137866440-137866467 | 7310 |
| TP-P46 | AAAGAAGTTAGCTTGAACTG | chr6: 137882061-137882088 | 7311 |
| TP-P47 | ATACCCTTACATTATGTATG | chr6: 137882108-137882135 | 7312 |
| TP-P48 | GCCCTAGAAGTACAATAGGA | chr6: 137882158-137882185 | 7313 |
| TP-P49 | AAGATATTTCTTCAGCTCTG | chr6: 137882341-137882368 | 7314 |
| TP-P50 | AGAGGCCAATTTACTCCCTG | chr6: 137882435-137882462 | 7315 |
| TP-P51 | CAAGGAGGTAGGACACTCAG | chr6: 137882596-137882623 | 7316 |
| TP-P52 | AATGGTCACAGGGAAAGATG | chr6: 137882650-137882677 | 7317 |
| TP-P53 | TCGTCTGGGAAAAACTTAGG | chr6: 137883012-137883039 | 7318 |
| TP-P54 | GATAAAGGCTGCCATTTTGG | chr6: 137882899-137882926 | 7319 |
| TP-P55 | TGGTGAGCAGAAATAGACAA | chr6: 137866501-137866528 | 7320 |
| TP-P56 | GCATGAGACGTAGGTCCCAG | chr6: 137866611-137866638 | 7321 |
| TP-P57 | TACCTAAGACTGGGGCCACG | chr6: 137866575-137866602 | 7322 |
| TP-P58 | GAAAACCCTAAAAACCACCC | chr6: 137866804-137866831 | 7323 |
| TP-P59 | CTGCAGAAAATCATCAACTG | chr6: 137866854-137866881 | 7324 |
| ZC-P1 | ACGCAAAAGAGGCAAGTCCA | chr1: 37479085-37479112 | 7325 |
| ZC-P2 | TGGGGTGAAGAGGCATTTGG | chr1: 37479536-37479563 | 7326 |
| ZC-P3 | CATGTGTACATCTGTCCCTG | chr1: 37479834-37479861 | 7327 |
| ZC-P4 | CACTACCACCACCAAAGCCA | chr1: 37480166-37480193 | 7328 |
| ZC-P5 | AAGTTGTAGGTCACTCCCAG | chr1: 37480498-37480525 | 7329 |
| ZC-P6 | AGCAGGTTAGGGAGCCCTGT | chr1: 37481520-37481547 | 7330 |
| ZC-P7 | CGCAACCTCCCATGGCCACA | chr1: 37481934-37481961 | 7331 |
| ZC-P8 | ACCCATAGAGCAGTTTTGCG | chr1: 37482275-37482302 | 7332 |
| ZC-P9 | GCAGGGGCACTTCAGAACCA | chr1: 37482686-37482713 | 7333 |
| ZC-P10 | CCACAAACCAAAGATACTGT | chr1: 37483748-37483775 | 7334 |
| ZC-P11 | CAAACCGTCTTTTCTCTCAG | chr1: 37483905-37483932 | 7335 |
| ZC-P12 | CACAGGTTCCCCCACCCATG | chr1: 37484257-37484284 | 7336 |
| ZC-P13 | AAGAAGAGGGTGTAGACGGA | chr1: 37484199-37484226 | 7337 |
| ZC-P14 | CTTTATTGATGTGTTACAGG | chr1: 37484331-37484358 | 7338 |
| ZC-P15 | AAGACAATCACCTCTTGAAA | chr1: 37484369-37484396 | 7339 |
| ZC-P16 | GTGGTGGTGAGGCACTGACG | chr1: 37474511-37474538 | 7340 |
| ZC-P17 | GACGGCGGCGCCTTTATATG | chr1: 37474548-37474575 | 7341 |
| ZC-P18 | CTCCCAAAACCACATCCAGC | chr1: 37475384-37475411 | 7342 |
| ZC-P19 | CTCCTACTGAACAACCAACA | chr1: 37475442-37475469 | 7343 |
| ZC-P20 | TCAGTAGGAGCTGTGGCGCG | chr1: 37475450-37475477 | 7344 |
| ZC-P21 | GATGCGAACCTCATGTGTCC | chr1: 37475959-37475986 | 7345 |
| SC-N2 | GTGATTCCGATTGTCGTGCG | chr16: 11257289-11257316 | 7346 |
| SC-N3 | TGTCAGGGCGCGTCCCAAGA | chr16: 11256538-11256565 | 7347 |
| SC-N4 | ATCGGGGTCGCCAAGTCCGA | chr16: 11256476-11256503 | 7348 |
| SC-N6 | GCGACTGAGGGCGTCGACGG | chr16: 11256714-11256741 | 7349 |
| SC-N7 | CGTCGACGGCGGGTGGAGCA | chr16: 11256703-11256730 | 7350 |
| SC-N8 | CGGCTCTCGCGCATGCTCCG | chr16: 11256135-11256162 | 7351 |
| SC-N9 | GCGTCCGGCGAGGACCGCTT | chr16: 11256320-11256347 | 7352 |
| SC-N10 | GGCCACATAAAAACCTGGCT | chr16: 11257384-11257411 | 7353 |
| SC-N11 | GCTTAACTGTATCTGGAGCC | chr16: 11254587-11254614 | 7354 |
| SC-N12 | CTTGGTTACTGGCCTCACAC | chr16: 11257414-11257441 | 7355 |
| SC-N14 | ATTTGCAATGGCTTGCAGAT | chr16: 11256971-11256998 | 7356 |
| SC-N15 | AGAGCCGCCCCGGAGCGCCC | chr16: 11256124-11256151 | 7357 |
| SC-N16 | CAGTATCTTTGCACAAACCA | chr16: 11254522-11254549 | 7358 |
| SC-N17 | CCTCGTCTCCAGCCGAGGGC | chr16: 11254683-11254710 | 7359 |
| SC-N18 | GAGGGTACCCACATGGTTCC | chr16: 11254753-11254780 | 7360 |
| SC-N20 | CTCTCCCCAAAATGAAGACG | chr16: 11257024-11257051 | 7361 |
| SC-N21 | ACCCCCTCAAGAGGTGAGAA | chr16: 11254652-11254679 | 7362 |
| SC-N22 | GGTCATTGGTGTAGCCTCCT | chr16: 11257651-11257677 | 7363 |
| SC-N24 | CTGGTTTGTGCAAAGATACT | chr16: 11254519-11254546 | 7364 |
| SC-N25 | GGCGAGGCGCCTCCCGCCCT | chr16: 11254700-11254727 | 7365 |
| SC-N26 | GACCCCTTCTCACCTCTTGA | chr16: 11254660-11254687 | 7366 |
| SC-N27 | AGGCGCCTCCCGCCCTCGGC | chr16: 11254696-11254723 | 7367 |
| SC-N28 | CGCCCAGGGCCCGGCTCACC | chr16: 11256055-11256082 | 7368 |
| SC-N29 | GCGTCCCGCGCCCCGCCGCC | chr16: 11256078-11256105 | 7369 |
| SC-N30 | CCGCCTCCTCGCCCAGGGCC | chr16: 11256046-11256073 | 7370 |
| SC-N31 | CGCCCCGCCGCCAGGTGAGC | chr16: 11256070-11256097 | 7371 |
| SC-N32 | GCCCCGCCGCCAGGTGAGCC | chr16: 11256069-11256096 | 7372 |
| SC-N33 | AGCGTCCGGGGGTGCGCTGC | chr16: 11255508-11255535 | 7373 |
| SC-N34 | GCGCTGCGGGAGAGACAAAG | chr16: 11255521-11255548 | 7374 |
| SC-N35 | TAGCGTCCGGGGGTGCGCTG | chr16: 11255507-11255534 | 7375 |
| CB-N1 | ACCAAATCTTGAGAAATGGA | chr3: 105656295-105656322 | 7376 |
| CB-N2 | GGCATAGTTAGATCTCCCTG | chr3: 105704010-105704037 | 7377 |
| CB-N3 | TGCCAACCGATTCATCATCA | chr3: 105720054-105720081 | 7378 |
| CB-N4 | AGGAACTGAGCCCATAATCG | chr3: 105720184-105720211 | 7379 |
| CB-N5 | GTTTAGGAGTCGGATGGTCA | chr3: 105720234-105720261 | 7380 |
| CB-N6 | ACCCCAAAAAGTCTTTTTGG | chr3: 105720341-105720368 | 7381 |
| CB-N7 | TAAATGCACTGAGAATAGGT | chr3: 105724104-105724131 | 7382 |
| CB-N8 | AGAAGTTATTGAGTTTCTGT | chr3: 105724165-105724192 | 7383 |
| CB-N9 | CAAAGATCTCTCCTGCTCTG | chr3: 105724248-105724275 | 7384 |
| CB-N10 | ATACGTAATGGAATGAAAAG | chr3: 105656481-105656508 | 7385 |
| CB-N11 | GTGCACATCAAATGCCCACA | chr3: 105734026-105734053 | 7386 |
| CB-N12 | AATCTTACAGAGCTGAAAAG | chr3: 105734082-105734109 | 7387 |
| CB-N13 | GTTATCTTTATCCTGATGGG | chr3: 105737237-105737264 | 7388 |
| CB-N14 | AGATGCAGAGATTTTGCTGG | chr3: 105656554-105656581 | 7389 |
| CB-N15 | AGCCCTGATTGATGGCAGCA | chr3: 105740501-105740528 | 7390 |
| CB-N16 | GTTGCACTCGATTGGGACAG | chr3: 105740592-105740619 | 7391 |
| CB-N17 | ACTTACTTAGGAACAAACCA | chr3: 105745836-105745863 | 7392 |
| CB-N18 | AATATAGCACCAAACCCGGA | chr3: 105745916-105745943 | 7393 |
| CB-N19 | AACCTGGACCTGAAATTTGG | chr3: 105656625-105656652 | 7394 |
| CB-N20 | TGAGCAGTTAGGTTTAATGT | chr3: 105749626-105749653 | 7395 |
| CB-N21 | AAATAAACAGTGCTATTCCA | chr3: 105656851-105656878 | 7396 |
| CB-N22 | ACGTAGACTAAGTTGACCCT | chr3: 105657189-105657216 | 7397 |
| CB-N23 | TACCATATCCAACTGGAGGG | chr3: 105776314-105776341 | 7398 |
| CB-N24 | GATTTCGTCTGTAGGCACAA | chr3: 105776530-105776557 | 7399 |
| CB-N25 | ATCAAAGCAATCTTTCCCAA | chr3: 105776471-105776498 | 7400 |
| CB-N26 | TGAACATCTAGTAGATCTGG | chr3: 105657234-105657261 | 7401 |
| CB-N27 | TTTACCCCAAAACAATTACA | chr3: 105853309-105853336 | 7402 |
| CB-N28 | AAGACTCTTTAAAGAAGGCA | chr3: 105853445-105853472 | 7403 |
| CB-N29 | AAAGACACCAATAGAGTGAA | chr3: 105655647-105655674 | 7404 |
| CB-N30 | TTCTAAATTCTAAAGCCCTG | chr3: 105657465-105657492 | 7405 |
| CB-N31 | ATTGTTGCCATAACAATGGT | chr3: 105867297-105867324 | 7406 |
| CB-N32 | CCCCACTTCAAACTGGACGG | chr3: 105868587-105868614 | 7407 |
| CB-N33 | CCTGATTTGATAAAGCAGTG | chr3: 105657731-105657758 | 7408 |
| CB-N34 | ATTCACCACAGAAAACCCCA | chr3: 105659148-105659175 | 7409 |
| CB-N35 | ATTTCTGGTGCAGTCCTGCG | chr3: 105659164-105659191 | 7410 |
| CB-N36 | GACCCTTTTAAGTTGCAGTG | chr3: 105655949-105655976 | 7411 |
| CB-N37 | TGTATGCTGAATGGAACACA | chr3: 105681777-105681804 | 7412 |
| CB-N38 | TAGTCCCAAACACATCCCGA | chr3: 105702244-105702271 | 7413 |
| CB1 | TTCCGCAAAATAGAGCCCCA | chr3: 105746011-105746038 | 7414 |
| CB2 | TGTGGGATGTCGACTCCTAG | chr3: 105702219-105702246 | 7415 |
| ZC3 | CAGCTCCCTCTAGTCCCGCG | chr1: 37475802-37475829 | 7416 |
| ZC7 | GGTTCAGACCAGTACTCTCG | chr1: 37483342-37483369 | 7417 |
| SC3 | ACGCCTGCGGATTCTACTG | chr16: 11255234-11255261 | 7418 |
| TP4 | TATGCCATGAGTGCTCAGAG | chr6: 137878648-137878675 | 7419 |
| TP2 | CTTGTGGCGCTGAAAACGAA | chr6: 137871496-137871523 | 7420 |

### Example 2

[0820] According to the experimental methods in the examples, the knockout effect of sgRNA targeting TNFAIP3 was detected.

### (A) Knockout Efficiency

| sgRNA No. | Knockout efficiency (%) |
|---|---|
| TP-P1 | C |
| TP-P2 | A |
| TP-P3 | B |
| TP-P4 | B |
| TP-P5 | A |
| TP-P6 | A |
| TP-P7 | B |
| TP-P8 | B |
| TP-P9 | B |
| TP-P10 | C |
| TP-P11 | C |
| TP-P12 | A |
| TP-P13 | A |
| TP-P14 | A |
| TP-P16 | A |
| TP-P17 | A |
| TP-P18 | A |
| TP-P19 | C |
| TP-P20 | A |
| TP-P21 | A |
| TP-P22 | B |
| TP-P23 | C |
| TP-P24 | A |
| TP-P25 | A |
| TP-P26 | C |
| TP-P27 | A |
| TP-P28 | B |
| TP-P29 | B |
| TP-P30 | A |
| TP-P31 | A |
| TP-P32 | A |
| TP-P33 | A |
| TP-P34 | B |
| TP-P35 | B |
| TP-P36 | A |
| TP-P37 | B |
| TP-P38 | A |
| TP-P39 | A |
| TP-P40 | A |
| TP-P41 | C |
| TP-P42 | B |
| TP-P43 | B |
| TP-P44 | A |
| TP-P45 | A |
| TP-P46 | A |
| TP-P47 | A |
| TP-P48 | A |
| TP-P49 | A |
| TP-P50 | C |
| TP-P51 | A |
| TP-P52 | A |
| TP-P53 | A |
| TP-P54 | B |
| TP-P55 | A |
| TP-P56 | C |
| TP-P57 | B |
| TP-P58 | B |
| TP-P59 | A |

[0821] Wherein, A indicated that the knockout efficiency was greater than or equal to 70%; B indicated that the knockout efficiency was greater than or equal to 50% and less than 70%; C indicated that the knockout efficiency was greater than or equal to 10% and less than 50%; D indicated that the knockout efficiency was less than 10%; N/A indicated not detected. Donor 045 was a healthy donor, and donor 053 was a healthy donor; PBMC cells were isolated from them and transduced with TCR to serve as TCR-T cells.

### (B) Proliferation Ability

[0822] FIG. 2A showed the TCR-T expansion fold of TNFAIP3 gene editing in the no-stimulation medium group. FIGS. 2B-2C showed the TCR-T expansion fold of TNFAIP3 gene editing in the TransAct stimulation group. Significant differences were relative to the unedited NT group: *indicated P<0.05, **indicated P<0.01, ***indicated P<0.001, ****indicated P<0.0001. The results indicated that, compared to the non-gene-edited control group (NT), T cells edited for the target gene of the present invention could have significantly improved expansion ability.

### (C) Killing Ability

[0823] FIGS. 2D-2G showed the target cell killing ability of TCR-T cells derived from different donors after TNFAIP3 gene editing. FIGS. 2D and 2F showed the killing curves at each time point, and FIGS. 2E and 2G showed the killing status of each test group at the end of the experiment, all of which were higher than the unedited NT group. Significant differences were relative to the unedited NT group: *indicated P<0.05, **indicated P<0.01, ***indicated P<0.001, ****indicated P<0.0001. The results indicated that, compared to the control group (NT), the target gene-edited T cells of the present invention could have significantly improved target cell killing ability and/or continuous killing ability.

### (D) Cytokine Release Ability

[0824] A CBA kit was used to detect the release of cytokines from unedited cells or cells with the target of the present invention knocked out. FIGS. 2H-2K showed the cytokine release ability of TNFAIP3 gene-edited TCR-T cells. The results indicated that, compared to the control group (NT), the T cells edited for the target gene of the present invention could have significantly improved cytokine release capacity.

### Example 3

[0825] According to the experimental methods in the examples, the knockout effect of the sgRNA targeting ZC3H12A was detected.

| sgRNA No. | knockout efficiency (%) |
|---|---|
| ZC-P1 | A |
| ZC-P2 | B |
| ZC-P3 | A |
| ZC-P4 | A |
| ZC-P5 | A |
| ZC-P6 | A |
| ZC-P7 | A |
| ZC-P8 | A |
| ZC-P9 | A |
| ZC-P10 | N/A |
| ZC-P11 | N/A |
| ZC-P12 | A |
| ZC-P13 | B |
| ZC-P14 | A |
| ZC-P15 | A |
| ZC-P16 | B |
| ZC-P17 | A |
| ZC-P18 | B |
| ZC-P19 | A |
| ZC-P20 | A |
| ZC-P21 | A |

[0826] Wherein, A indicated that the knockout efficiency was greater than or equal to 70%; B indicated that the knockout efficiency was greater than or equal to 50% and less than 70%; C indicated that the knockout efficiency was greater than or equal to 10% and less than 50%; D indicated that the knockout efficiency was less than 10%; N/A indicated not detected.

### (B) Proliferation Ability

[0827] FIG. 3A showed the TCR-T expansion fold of ZC3H12A gene editing in the no-stimulation medium group. FIG. 3B showed the TCR-T expansion fold of ZC3H12A gene editing in the TransAct stimulation group. Significant differences were relative to the unedited NT group: *indicated P<0.05, **indicated P<0.01, ***indicated P<0.001, ****indicated P<0.0001. The results indicated that, compared to the non-gene-edited control group (NT), T cells edited for the target gene of the present invention could have significantly improved expansion ability.

### (C) Killing Ability

[0828] FIGS. 3C-3F showed the target cell killing ability of ZC3H12A gene-edited TCR-T cells. FIGS. 3C and 3E showed the killing curves at each time point, and FIGS. 3D and 3F showed the killing status of each test group at the end of the experiment, all of which were higher than the unedited NT group. Significant differences were relative to the unedited NT group: *indicated P<0.05, **indicated P<0.01, ***indicated P<0.001, ****indicated P<0.0001. The results indicated that, compared to the control group (NT), the target gene-edited T cells of the present invention could have significantly improved target cell killing ability and/or continuous killing ability.

### (D) Cytokine Release Ability

[0829] A CBA kit was used to detect the release of cytokines from unedited cells or cells with the target of the present invention knocked out. FIGS. 3G-3J showed the cytokine release ability of ZC3H12A gene-edited TCR-T cells. The results indicated that, compared to the control group (NT), the T cells edited for the target gene of the present invention could have significantly improved cytokine release capabilities.

### Example 4

[0830] According to the experimental methods in the examples, the knockout effect of sgRNA targeting SOCS1 was detected.

| sgRNA No. | knockout efficiency (%) |
|---|---|
| SC-N2 | A |
| SC-N3 | A |
| SC-N4 | C |
| SC-N6 | A |
| SC-N7 | A |
| SC-N8 | A |
| SC-N9 | A |
| SC-N10 | A |
| SC-N11 | B |
| SC-N12 | A |
| SC-N14 | D |
| SC-N15 | A |
| SC-N16 | B |
| SC-N17 | B |
| SC-N18 | A |
| SC-N20 | A |
| SC-N21 | B |
| SC-N22 | A |
| SC-N24 | A |
| SC-N25 | B |
| SC-N26 | C |
| SC-N27 | C |
| SC-N28 | A |
| SC-N29 | A |
| SC-N30 | A |
| SC-N31 | A |
| SC-N32 | A |
| SC-N33 | A |
| SC-N34 | A |
| SC-N35 | A |

[0831] Wherein, A indicated that the knockout efficiency was greater than or equal to 70%; B indicated that the knockout efficiency was greater than or equal to 50% and less than 70%; C indicated that the knockout efficiency was greater than or equal to 10% and less than 50%; D indicated that the knockout efficiency was less than 10%; N/A indicated not detected. Donor 005 was a healthy donor, donor 006 was a healthy donor, and donor 031 was a healthy donor; PBMC cells were isolated from them and transduced with TCR to serve as TCR-T cells. Donor 105 was a lung cancer donor, and donor 306 was a cervical cancer donor; TILs were isolated and provided from them.

### (B) Proliferation Ability

[0832] FIG. 4A showed the TCR-T expansion fold of SOCS1 gene editing in the no-stimulation medium group. FIG. 4B showed the TCR-T expansion fold of SOCS1 gene editing in the TransAct stimulation group. FIG. 4C showed the TIL expansion fold of SOCS1 gene editing in the no-stimulation medium group. FIG. 4D showed the TIL expansion fold of SOCS1 gene editing in the TransAct stimulation group. Significant differences were relative to the unedited NT group: *indicated P<0.05, **indicated P<0.01, ***indicated P<0.001, ****indicated P<0.0001. The results indicated that, compared to the non-gene-edited control group (NT), T cells edited for the target gene of the present invention could have significantly improved expansion ability.

### (C) Killing Ability

[0833] FIGS. 4E-4H showed the target cell killing ability of SOCS1 gene-edited TCR-T cells. Each figure showed the killing curve at each time point, as well as the killing situation of each test group at specific time points, which were higher than the unedited NT group. FIG. 4I showed the target cell killing ability of SOCS1 gene-edited TIL cells. Significant differences were relative to the unedited NT group: *indicated P<0.05, **indicated P<0.01, ***indicated P<0.001, ****indicated P<0.0001. The results indicated that, compared to the control group (NT), the target gene-edited T cells of the present invention could have significantly improved target cell killing ability and/or continuous killing ability.

### (D) Cytokine Expression and Release

[0834] A flow cytometer was used to detect the cytokine expression of unedited cells or cells with the target of the present invention knocked out, and a CBA kit was used to detect the cytokine release ability. FIG. 4J showed the cytokine expression of SOCS1 gene-edited TCR-T cells in the unstimulated group. FIG. 4K showed the cytokine expression of SOCS1 gene-edited TCR-T cells in the CD3 antibody stimulation group. FIG. 4L showed the cytokine release ability of SOCS1 gene-edited TCR-T cells co-cultured with A375 target cells. FIG. 4M showed the cytokine expression of SOCS1 gene-edited TIL cells in the unstimulated group. FIG. 4N showed the cytokine expression of SOCS1 gene-edited TIL cells in the TransAct stimulation group. The results indicated that, compared to the control group (NT), the T cells edited for the target gene of the present invention could have significantly improved cytokine expression and/or release capabilities.

### (E) Flow Cytometry Detection

[0835] FIG. 4O showed that TIL cells after SOCS1 gene editing had a higher proportion of stem-like cells. FIG. 4P showed that TIL cells after SOCS1 gene editing had a lower proportion of exhausted T cells. For example, stem-like cells could be CD39 negative CD69 negative cells. For example, exhausted T cells could be PD-1 positive, LAG-3 positive, TIM-3 positive, CD38 positive and/or CD101 positive cells. The results indicated that, compared to the non-gene-edited control group (NT), the gene-edited TIL cells of the present invention could have more favorable cell phenotypic characteristics.

### Example 5

[0836] According to the experimental methods in the examples, the knockout effect of sgRNA targeting CBLB was detected.

| | knockout |
|---|---|
| | efficiency |
| sgRNA No. | (%) |
| CB-N1 | B |
| CB-N2 | A |
| CB-N3 | C |
| CB-N4 | B |
| CB-N5 | A |
| CB-N6 | B |
| CB-N7 | B |
| CB-N8 | C |
| CB-N9 | B |
| CB-N10 | C |
| CB-N11 | A |
| CB-N12 | A |
| CB-N13 | C |
| CB-N14 | C |
| CB-N15 | A |
| CB-N16 | N/A |
| CB-N17 | B |
| CB-N18 | B |
| CB-N19 | C |
| CB-N20 | A |
| CB-N21 | A |
| CB-N22 | A |
| CB-N23 | N/A |
| CB-N24 | N/A |
| CB-N25 | N/A |
| CB-N26 | C |
| CB-N27 | A |
| CB-N28 | A |
| CB-N29 | C |
| CB-N30 | C |
| CB-N31 | B |
| CB-N32 | N/A |
| CB-N33 | B |
| CB-N34 | N/A |
| CB-N35 | N/A |
| CB-N36 | N/A |
| CB-N37 | N/A |
| CB-N38 | N/A |

[0837] Wherein, A indicated that the knockout efficiency was greater than or equal to 70%; B indicated that the knockout efficiency was greater than or equal to 50% and less than 70%; C indicated that the knockout efficiency was greater than or equal to 10% and less than 50%; D indicated that the knockout efficiency was less than 10%; N/A indicated not detected.

### (B) Proliferation Ability

[0838] FIGS. 5A-5B showed the TCR-T expansion fold of CBLB gene editing in the no-stimulation medium group. FIGS. 5C-5D showed the TCR-T expansion fold of CBLB gene editing in the TransAct stimulation group. Significant differences were relative to the unedited NT group: *indicated P<0.05, **indicated P<0.01, ***indicated P<0.001, ****indicated P<0.0001. The results indicated that, compared to the non-gene-edited control group (NT), T cells edited for the target gene of the present invention could have significantly improved expansion ability.

### (C) Killing Ability

[0839] FIGS. 5E-5H showed the target cell killing ability of CBLB gene-edited TCR-T cells. FIGS. 5E and 5G showed the killing curves at each time point, and FIGS. 5F and 5H showed the killing status of each test group at the end of the experiment, all of which were higher than the unedited NT group. Significant differences were relative to the unedited NT group: *indicated P<0.05, **indicated P<0.01, ***indicated P<0.001, ****indicated P<0.0001. The results indicated that, compared to the control group (NT), the target gene-edited T cells of the present invention could have significantly improved target cell killing ability and/or continuous killing ability.

### (D) Cytokine Release Ability

[0840] A CBA kit was used to detect the release of cytokines from unedited cells or cells with the target of the present invention knocked out. FIGS. 5I-5L showed the cytokine release ability of CBLB gene-edited TCR-T cells. The results indicated that, compared to the control group (NT), the T cells edited for the target gene of the present invention could have significantly improved cytokine release capacity.

### Example 6

[0841] According to the experimental methods in the embodiments, the knockout effect of sgRNAs targeting two or more selected from TNFAIP3, ZC3H12A, SOCS1, and CBLB was detected.

| | | knockout | | | knockout |
|---|---|---|---|---|---|
| Target | sgRNA | efficiency | Target | sgRNA | efficiency |
| combination | No. | (%) | combination | No. | (%) |
| CBLB + | CB1 | A | SOCS1 + | SC3 | A |
| ZC3H12A | ZC3 | A | ZC3H12A | ZC7 | A |
| SOCS1 + | SC3 | A | TNFAIP3 + | TP4 | A |
| CBLB | CB1 | A | CBLB | CB1 | A |
| SOCS1 + | SC3 | A | TNFAIP3 + | TP4 | A |
| CBLB | CB2 | A | ZC3H12A | ZC3 | A |
| SOCS1 + | SC3 | A | TNFAIP3 + | TP4 | A |
| TNFAIP3 | TP4 | A | ZC3H12A | ZC7 | A |
| SOCS1 + | SC3 | A | SOCS1 + | TP2 | A |
| ZC3H12A | ZC3 | A | TNFAIP3 | SC-N30 | B |
| SOCS1 + | TP2 | A | SOCS1 + | TP2 | A |
| TNFAIP3 | SC-N28 | A | TNFAIP3 | SC-N33 | A |

[0842] Wherein, A indicated that the knockout efficiency was greater than or equal to 70%; B indicated that the knockout efficiency was greater than or equal to 50% and less than 70%; C indicated that the knockout efficiency was greater than or equal to 10% and less than 50%; D indicated that the knockout efficiency was less than 10%; N/A indicated not detected. Donor 713 was a cervical cancer patient, donor 316 was a malignant melanoma patient, and donors 504 and 607 were ovarian cancer patients. Donor 801 was a cervical cancer patient, and donor 312 was a cervical cancer patient.

### (B) Expansion Status

[0843] FIGS. 6A, 6B, 6C, 6E, 6G, 6H, and 6J showed the TIL expansion fold of combined gene editing in the no-stimulation medium group. FIGS. 6D, 6F, and 6I showed the TIL expansion fold of combined gene editing in the CD3 antibody stimulation group. FIG. 6K showed the TIL expansion fold of combined gene editing in the TransAct antibody stimulation group. Significant differences were relative to the unedited NT group: *indicated P<0.05, **indicated P<0.01, indicated P<0.001, ****indicated P<0.0001. The results indicated that, compared to the non-gene-edited control group (NT), TIL cells edited with the target combination of the present invention could have significantly improved expansion ability.

### (C) Killing Status

[0844] FIGS. 7A to 7S showed the target cell killing ability of combinatorially gene-edited TIL cells. FIG. 7T showed the killing ability of combined gene-edited TIL cells against autologous tumor organoids. Significant differences were relative to the unedited NT group: *indicated P<0.05, **indicated P<0.01, ***indicated P<0.001, ****indicated P<0.0001. The results indicated that, compared to the control group (NT), TIL cells edited with the target combination gene of the present invention could have significantly improved target cell killing ability.

### (D) Cell Flow Cytometry Detection

[0845] FIGS. 8A, 8C, 8E, 8G, 8H, 8I, 8L, 8M, and 8O showed that TIL cells after combined gene editing had a lower proportion of exhausted T cells. FIGS. 8B, 8D, 8F, and 8K showed that TIL cells after combined gene editing had a higher proportion of central memory T cells. FIG. 8J showed that TIL cells edited with the combination of TNFAIP3 and ZC3H12A had a higher proportion of naive T cells. FIG. 8N showed that TIL cells edited with the combination of TNFAIP3 and SOCS1 had a higher proportion of stem-like cells. For example, exhausted T cells could be PD-1 positive, LAG-3 positive, TIM-3 positive, CD38 positive and/or CD101 positive cells. For example, central memory T cells could be CD45RO positive CD62L positive cells. For example, stem-like cells could be CD39 negative CD69 negative cells. The results indicated that, compared to the non-gene-edited control group (NT), TIL cells edited with the target combination of the present invention could have more favorable cell phenotypic characteristics.

### (E) Cytokine Expression and Release

[0846] FIGS. 9A, 9C, 9E, 9G, 9I, and 9L showed that TIL cells after various combination gene edits in the CD3 antibody stimulation group had higher cytokine expression ratios. FIGS. 9B, 9D, 9F, 9H, 9J, and 9K showed that TIL cells after various combination gene edits in the no-stimulation Medium group had higher cytokine expression ratios. FIG. 9M showed that TIL cells genetically edited with the combination of TNFAIP3 and SOCS1 co-cultured with autologous tumor organoids had higher cytokine release capacity. For example, cytokine expression ability included higher IFN-γ expression ability, higher TNF-α expression ability, higher CD107a expression ability, or higher GZMB expression ability. The results indicated that TIL cells edited with the target combination gene of the present invention had higher functional cytokine expression ability.

### (F) Apoptosis Detection

[0847] FIG. 10 showed the results of apoptosis detection of TIL cells derived from donor 504. The results indicated that TIL cells edited with the target combination gene of the present invention could have a more significant anti-apoptotic ability.

### Example 7 In Vivo Efficacy Testing of Gene-Edited Cells

### (I) In Vivo Effects of Gene-Edited TCR-T Cells of the Present Invention

[0848] Immunodeficient mice (NOG mice, Vital River, strain code 408) were subcutaneously inoculated with A375 cells, at an inoculation quantity of approximately 1×10⁶ cells/mouse. Seven days after inoculation, when the tumor volume reached approximately 50-80 mm³, the mice were randomly grouped according to tumor volume based on the following protocol:

| | Cell | IL-2 injection | mice number in |
|---|---|---|---|
| Group | number | amount (IU) | each group |
| Blank control | 0 | — | 6 |
| unmodified cells | 2 × 10⁷ | 3E5*Bid*3 | 6 |
| SC3 + TP4 knockout | 2 × 10⁷ | 0.6E5*Bid*3 | 6 |
| TP4 + CB1 knockout | 2 × 10⁷ | 0.6E5*Bid*3 | 6 |
| TP4 + ZC3 knockout | 2 × 10⁷ | 0.6E5*Bid*3 | 6 |

[0849] The day each group was injected into the tail vein with TCR-T cells gene-edited using the sgRNA numbers provided by the present invention was recorded as day 0. Simultaneously, IL-2 was administered by intraperitoneal injection, once every 12 hours, for 6 consecutive times. The injection dose of IL-2 was 3×10⁵ IU/dose for the NT group and 0.6×10⁵ IU/dose for each experimental group. Tumor volume was measured twice a week, and the tumor growth inhibition (TGI) rate on day 28 was calculated as follows:

| Group | TGI(%) | P value |
|---|---|---|
| Blank control | (tumor volume | — |
| | 3156.06 mm³) | |
| Unmodified cells | 28.66% | 0.024 |
| SC3 + TP4 knockout | A | 0.000078 |
| TP4 + CB1 knockout | A | 0.00087 |
| TP4 + ZC3 knockout | A | 0.000068 |

[0850] Data were analyzed using a T-test. Herein, A indicated TGI was greater than or equal to 50%.

### (II) In Vivo Effects of Gene-Edited TILs of the Present Invention

[0851] Immunodeficient mice (NOG mice, Vital River, strain code 408) were subcutaneously inoculated with HeyT-30 cells, at an inoculation quantity of approximately 1×10⁶ cells/mouse. Seven days after inoculation, when the tumor volume reached approximately 50-80 mm³, the mice were randomly grouped according to tumor volume based on the following protocol:

| | Cell | IL-2 injection | mice number in |
|---|---|---|---|
| Group | number | amount (IU) | each group |
| Blank control | 0 | — | 6 |
| Unmodified cells | 2 × 10⁷ | 3E5*Bid*3 | 6 |
| SC3 + TP4 knockout | 2 × 10⁷ | 0.6E5*Bid*3 | 6 |
| TP4 + ZC3 knockout | 2 × 10⁷ | 0.6E5*Bid*3 | 6 |

[0852] The day each group was injected into the tail vein with TIL cells gene-edited using the sgRNA numbers provided by the present invention was recorded as day 0. Simultaneously, IL-2 was administered by intraperitoneal injection, once every 12 hours, for 6 consecutive times. The injection dose of IL-2 was 3×10⁵ IU/dose for the NT group and 0.6×10⁵ IU/dose for each experimental group. Tumor volumes were measured twice weekly, and tumor growth inhibition rates were calculated as follows:

| Group | TGI(%) | P value |
|---|---|---|
| Blank control | (tumor volume | — |
| | 3682.13 mm³) | |
| Unmodified cells | 8.11% | 0.262 |
| SC3 + TP4 knockout | A | <0.000001 |
| TP4 + ZC3 knockout | A | <0.000001 |

[0853] Data were analyzed using a T-test. Herein, A indicated that TGI was greater than or equal to 80%. The results showed that the mice in the experimental groups exhibited better tumor control effects and/or in vivo functional cytokine release compared to the NT group, demonstrating that the anti-tumor effect of cells knocked out with sgRNAs provided by the present invention was significantly stronger than that of the NT group.

[0854] The foregoing detailed description was provided by way of explanation and example and was not intended to limit the scope of the appended claims. Various modifications to the presently illustrated embodiments of the invention will be apparent to those skilled in the art and remain within the scope of the appended claims and their equivalents.

TABLE 1A
Human TNFAIP3 selected target region genomic coordinate

| Region No. | Subregion coordinate range |
|---|---|
| TNFAIP3 R_1 | chr6: 137864849-137866349 |
| TNFAIP3 R_2 | chr6: 137864869-137865029 |
| TNFAIP3 R_3 | chr6: 137865069-137865129 |
| TNFAIP3 R_4 | chr6: 137865269-137865419 |
| TNFAIP3 R_5 | chr6: 137865469-137865719 |
| TNFAIP3 R_6 | chr6: 137866139-137866199 |
| TNFAIP3 R_7 | chr6: 137866269-137866339 |
| TNFAIP3 R_8 | chr6: 137866349-137866972 |
| TNFAIP3 R_9 | chr6: 137867259-137868241 |
| TNFAIP3 R_10 | chr6: 137870833-137870912 |
| TNFAIP3 R_11 | chr6: 137871035-137871248 |
| TNFAIP3 R_12 | chr6: 137871269-137871361 |
| TNFAIP3 R_13 | chr6: 137874892-137874971 |
| TNFAIP3 R_14 | chr6: 137874992-137875035 |
| TNFAIP3 R_15 | chr6: 137875688-137875730 |
| TNFAIP3 R_16 | chr6: 137875770-137875819 |
| TNFAIP3 R_17 | chr6: 137875996-137876082 |
| TNFAIP3 R_18 | chr6: 137877076-137877172 |
| TNFAIP3 R_19 | chr6: 137877219-137877256 |
| TNFAIP3 R_20 | chr6: 137878467-137878494 |
| TNFAIP3 R_21 | chr6: 137878530-137878570 |
| TNFAIP3 R_22 | chr6: 137878593-137878652 |
| TNFAIP3 R_23 | chr6: 137878673-137878709 |
| TNFAIP3 R_24 | chr6: 137878866-137878900 |
| TNFAIP3 R_25 | chr6: 137878921-137878973 |
| TNFAIP3 R_26 | chr6: 137879022-137879269 |
| TNFAIP3 R_27 | chr6: 137879290-137879351 |
| TNFAIP3 R_28 | chr6: 137880071-137880091 |
| TNFAIP3 R_29 | chr6: 137880153-137880252 |
| TNFAIP3 R_30 | chr6: 137881035-137883312 |

TABLE 1B
Human ZC3H12A selected target region genomic coordinate

| Region No. | Subregion coordinate range |
|---|---|
| ZC3H12A R_1 | chr1: 37473080-37474580 |
| ZC3H12A R_2 | chr1: 37473160-37473310 |
| ZC3H12A R_3 | chr1: 37473540-37473780 |
| ZC3H12A R_4 | chr1: 37473860-37474050 |
| ZC3H12A R_5 | chr1: 37474310-37474560 |
| ZC3H12A R_6 | chr1: 37474580-37474629 |
| ZC3H12A R_7 | chr1: 37475459-37475481 |
| ZC3H12A R_8 | chr1: 37479151-37479925 |
| ZC3H12A R_9 | chr1: 37483639-37484377 |

TABLE 1C
Human SOCS1 selected target region genomic coordinate

| Region No. | Subregion coordinate range |
|---|---|
| SOCS1 R_1 | chr16: 11256204-11257704 |
| SOCS1 R_2 | chr16: 11257484-11257674 |
| SOCS1 R_3 | chr16: 11257124-11257304 |
| SOCS1 R_4 | chr16: 11256774-11257004 |
| SOCS1 R_5 | chr16: 11256664-11256754 |
| SOCS1 R_6 | chr16: 11256434-11256624 |
| SOCS1 R_7 | chr16: 11256214-11256424 |
| SOCS1 R_8 | chr16: 11256079-11256204 |
| SOCS1 R_9 | chr16: 11255501-11255528 |
| SOCS1 R_10 | chr16: 11254417-11254810 |

TABLE 1D
Human CBLB selected target region genomic coordinate

| Region No. | Subregion coordinate range |
|---|---|
| CBLB R_1 | chr3: 105869449-105870949 |
| CBLB R_2 | chr3: 105870699-105870939 |
| CBLB R_3 | chr3: 105870399-105870599 |
| CBLB R_4 | chr3: 105870099-105870299 |
| CBLB R_5 | chr3: 105869879-105870029 |
| CBLB R_6 | chr3: 105869659-105869839 |
| CBLB R_7 | chr3: 105869459-105869619 |
| CBLB R_8 | chr3: 105655461-105659229 |
| CBLB R_9 | chr3: 105670233-105670352 |
| CBLB R_10 | chr3: 105671021-105672462 |
| CBLB R_11 | chr3: 105675760-105675877 |
| CBLB R_12 | chr3: 105678431-105678571 |
| CBLB R_13 | chr3: 105681479-105681610 |
| CBLB R_14 | chr3: 105681724-105681818 |
| CBLB R_15 | chr3: 105685320-105685466 |
| CBLB R_16 | chr3: 105693494-105693540 |
| CBLB R_17 | chr3: 105693561-105693588 |
| CBLB R_18 | chr3: 105702094-105702459 |
| CBLB R_19 | chr3: 105703988-105704173 |
| CBLB R_20 | chr3: 105715200-105715313 |
| CBLB R_21 | chr3: 105720047-105720110 |
| CBLB R_22 | chr3: 105720131-105720159 |
| CBLB R_23 | chr3: 105720180-105720250 |
| CBLB R_24 | chr3: 105724026-105724189 |
| CBLB R_25 | chr3: 105734009-105734140 |
| CBLB R_26 | chr3: 105737171-105737258 |
| CBLB R_27 | chr3: 105740494-105740631 |
| CBLB R_28 | chr3: 105745917-105746038 |
| CBLB R_29 | chr3: 105749622-105749799 |
| CBLB R_30 | chr3: 105751473-105751618 |
| CBLB R_31 | chr3: 105754343-105754474 |
| CBLB R_32 | chr3: 105776396-105776542 |
| CBLB R_33 | chr3: 105824123-105824241 |
| CBLB R_34 | chr3: 105839423-105839470 |
| CBLB R_35 | chr3: 105853441-105853474 |
| CBLB R_36 | chr3: 105853534-105853599 |
| CBLB R_37 | chr3: 105853620-105853664 |
| CBLB R_38 | chr3: 105867469-105867528 |
| CBLB R_39 | chr3: 105867549-105867591 |
| CBLB R_40 | chr3: 105868169-105868381 |
| CBLB R_41 | chr3: 105868532-105868559 |
| CBLB R_42 | chr3: 105868736-105869012 |
| CBLB R_43 | chr3: 105869337-105869401 |
| CBLB R_44 | chr3: 105869425-105869449 |

TABLE 2A
Human TNFAIP3 genomic coordinate for multiple knockout

| Target No. | Target coordinate range |
|---|---|
| TNFAIP3 1 | chr6: 137883002-137883029 |
| TNFAIP3 2 | chr6: 137881684-137881711 |
| TNFAIP3 3 | chr6: 137882650-137882677 |
| TNFAIP3 4 | chr6: 137882458-137882485 |
| TNFAIP3 5 | chr6: 137881743-137881770 |
| TNFAIP3 6 | chr6: 137882605-137882632 |
| TNFAIP3 7 | chr6: 137881395-137881422 |
| TNFAIP3 8 | chr6: 137882435-137882462 |
| TNFAIP3 9 | chr6: 137882615-137882642 |
| TNFAIP3 10 | chr6: 137881514-137881541 |
| TNFAIP3 11 | chr6: 137882632-137882659 |
| TNFAIP3 12 | chr6: 137882768-137882795 |
| TNFAIP3 13 | chr6: 137881916-137881943 |
| TNFAIP3 14 | chr6: 137881145-137881172 |
| TNFAIP3 15 | chr6: 137881909-137881936 |
| TNFAIP3 16 | chr6: 137881647-137881674 |
| TNFAIP3 17 | chr6: 137882639-137882666 |
| TNFAIP3 18 | chr6: 137881538-137881565 |
| TNFAIP3 19 | chr6: 137881468-137881495 |
| TNFAIP3 20 | chr6: 137881307-137881334 |
| TNFAIP3 21 | chr6: 137881851-137881878 |
| TNFAIP3 22 | chr6: 137881303-137881330 |
| TNFAIP3 23 | chr6: 137882387-137882414 |
| TNFAIP3 24 | chr6: 137881296-137881323 |
| TNFAIP3 25 | chr6: 137882596-137882623 |
| TNFAIP3 26 | chr6: 137882476-137882503 |
| TNFAIP3 27 | chr6: 137881744-137881771 |
| TNFAIP3 28 | chr6: 137881894-137881921 |
| TNFAIP3 29 | chr6: 137881150-137881177 |
| TNFAIP3 30 | chr6: 137881400-137881427 |
| TNFAIP3 31 | chr6: 137881352-137881379 |
| TNFAIP3 32 | chr6: 137882609-137882636 |
| TNFAIP3 33 | chr6: 137882592-137882619 |
| TNFAIP3 34 | chr6: 137882695-137882722 |
| TNFAIP3 35 | chr6: 137881793-137881820 |
| TNFAIP3 36 | chr6: 137882396-137882423 |
| TNFAIP3 37 | chr6: 137881503-137881530 |
| TNFAIP3 38 | chr6: 137881597-137881624 |
| TNFAIP3 39 | chr6: 137882752-137882779 |
| TNFAIP3 40 | chr6: 137883004-137883031 |
| TNFAIP3 41 | chr6: 137881683-137881710 |
| TNFAIP3 42 | chr6: 137882389-137882416 |
| TNFAIP3 43 | chr6: 137881437-137881464 |
| TNFAIP3 44 | chr6: 137882899-137882926 |
| TNFAIP3 45 | chr6: 137881017-137881044 |
| TNFAIP3 46 | chr6: 137882616-137882643 |
| TNFAIP3 47 | chr6: 137881467-137881494 |
| TNFAIP3 48 | chr6: 137881756-137881783 |
| TNFAIP3 49 | chr6: 137881515-137881542 |
| TNFAIP3 50 | chr6: 137881237-137881264 |
| TNFAIP3 51 | chr6: 137882158-137882185 |
| TNFAIP3 52 | chr6: 137882260-137882287 |
| TNFAIP3 53 | chr6: 137882753-137882780 |
| TNFAIP3 54 | chr6: 137881590-137881617 |
| TNFAIP3 55 | chr6: 137881895-137881922 |
| TNFAIP3 56 | chr6: 137881243-137881270 |
| TNFAIP3 57 | chr6: 137881559-137881586 |
| TNFAIP3 58 | chr6: 137881328-137881355 |
| TNFAIP3 59 | chr6: 137881329-137881356 |
| TNFAIP3 60 | chr6: 137882744-137882771 |
| TNFAIP3 61 | chr6: 137882697-137882724 |
| TNFAIP3 62 | chr6: 137881264-137881291 |
| TNFAIP3 63 | chr6: 137881418-137881445 |
| TNFAIP3 64 | chr6: 137882604-137882631 |
| TNFAIP3 65 | chr6: 137882607-137882634 |
| TNFAIP3 66 | chr6: 137881306-137881333 |
| TNFAIP3 67 | chr6: 137881802-137881829 |
| TNFAIP3 68 | chr6: 137881745-137881772 |
| TNFAIP3 69 | chr6: 137881912-137881939 |
| TNFAIP3 70 | chr6: 137881149-137881176 |
| TNFAIP3 71 | chr6: 137881393-137881420 |
| TNFAIP3 72 | chr6: 137881650-137881677 |
| TNFAIP3 73 | chr6: 137881661-137881688 |
| TNFAIP3 74 | chr6: 137882743-137882770 |
| TNFAIP3 75 | chr6: 137882611-137882638 |
| TNFAIP3 76 | chr6: 137883012-137883039 |
| TNFAIP3 77 | chr6: 137882694-137882721 |
| TNFAIP3 78 | chr6: 137881646-137881673 |
| TNFAIP3 79 | chr6: 137882640-137882667 |
| TNFAIP3 80 | chr6: 137881238-137881265 |
| TNFAIP3 81 | chr6: 137882154-137882181 |
| TNFAIP3 82 | chr6: 137882415-137882442 |
| TNFAIP3 83 | chr6: 137881560-137881587 |
| TNFAIP3 84 | chr6: 137882696-137882723 |
| TNFAIP3 85 | chr6: 137881660-137881687 |
| TNFAIP3 86 | chr6: 137881561-137881588 |
| TNFAIP3 87 | chr6: 137881792-137881819 |
| TNFAIP3 88 | chr6: 137881239-137881266 |
| TNFAIP3 89 | chr6: 137881599-137881626 |
| TNFAIP3 90 | chr6: 137881502-137881529 |
| TNFAIP3 91 | chr6: 137881598-137881625 |
| TNFAIP3 92 | chr6: 137881249-137881276 |
| TNFAIP3 93 | chr6: 137878538-137878565 |
| TNFAIP3 94 | chr6: 137871496-137871523 |
| TNFAIP3 95 | chr6: 137878648-137878675 |
| TNFAIP3 96 | chr6: 137871496-137871523 |
| TNFAIP3 97 | chr6: 137871480-137871507 |
| TNFAIP3 98 | chr6: 137874839-137874866 |
| TNFAIP3 99 | chr6: 137878978-137879005 |
| TNFAIP3 100 | chr6: 137879017-137879044 |
| TNFAIP3 101 | chr6: 137874830-137874857 |
| TNFAIP3 102 | chr6: 137877190-137877217 |
| TNFAIP3 103 | chr6: 137878939-137878966 |
| TNFAIP3 104 | chr6: 137871480-137871507 |
| TNFAIP3 105 | chr6: 137871470-137871497 |
| TNFAIP3 106 | chr6: 137876099-137876126 |

TABLE 2B
Human ZC3H12A genomic coordinate for multiple knockout

| Target No. | Target coordinate range |
|---|---|
| ZC3H12A 1 | chr1: 37483906-37483933 |
| ZC3H12A 2 | chr1: 37484370-37484397 |
| ZC3H12A 3 | chr1: 37484259-37484286 |
| ZC3H12A 4 | chr1: 37483753-37483780 |
| ZC3H12A 5 | chr1: 37483760-37483787 |
| ZC3H12A 6 | chr1: 37484199-37484226 |
| ZC3H12A 7 | chr1: 37484369-37484396 |
| ZC3H12A 8 | chr1: 37484258-37484285 |
| ZC3H12A 9 | chr1: 37483759-37483786 |
| ZC3H12A 10 | chr1: 37484237-37484264 |
| ZC3H12A 11 | chr1: 37484241-37484268 |
| ZC3H12A 12 | chr1: 37483905-37483932 |
| ZC3H12A 13 | chr1: 37484257-37484284 |
| ZC3H12A 14 | chr1: 37482729-37482756 |
| ZC3H12A 15 | chr1: 37482795-37482822 |
| ZC3H12A 16 | chr1: 37483748-37483775 |
| ZC3H12A 17 | chr1: 37482728-37482755 |
| ZC3H12A 18 | chr1: 37483909-37483936 |
| ZC3H12A 19 | chr1: 37483793-37483820 |
| ZC3H12A 20 | chr1: 37483910-37483937 |
| ZC3H12A 21 | chr1: 37483752-37483779 |
| ZC3H12A 22 | chr1: 37482797-37482824 |
| ZC3H12A 23 | chr1: 37483794-37483821 |
| ZC3H12A 24 | chr1: 37484163-37484190 |
| ZC3H12A 25 | chr1: 37484331-37484358 |
| ZC3H12A 26 | chr1: 37484200-37484227 |
| ZC3H12A 27 | chr1: 37482749-37482776 |
| ZC3H12A 28 | chr1: 37484073-37484100 |
| ZC3H12A 29 | chr1: 37484082-37484109 |
| ZC3H12A 30 | chr1: 37482759-37482786 |
| ZC3H12A 31 | chr1: 37482765-37482792 |
| ZC3H12A 32 | chr1: 37484076-37484103 |
| ZC3H12A 33 | chr1: 37482798-37482825 |
| ZC3H12A 34 | chr1: 37483675-37483702 |
| ZC3H12A 35 | chr1: 37484203-37484230 |
| ZC3H12A 36 | chr1: 37484075-37484102 |
| ZC3H12A 37 | chr1: 37484231-37484258 |
| ZC3H12A 38 | chr1: 37482827-37482854 |
| ZC3H12A 39 | chr1: 37484334-37484361 |
| ZC3H12A 40 | chr1: 37483855-37483882 |
| ZC3H12A 41 | chr1: 37484238-37484265 |
| ZC3H12A 42 | chr1: 37482822-37482849 |
| ZC3H12A 43 | chr1: 37482727-37482754 |
| ZC3H12A 44 | chr1: 37484252-37484279 |
| ZC3H12A 45 | chr1: 37482796-37482823 |
| ZC3H12A 46 | chr1: 37484354-37484381 |
| ZC3H12A 47 | chr1: 37482710-37482737 |
| ZC3H12A 48 | chr1: 37482716-37482743 |
| ZC3H12A 49 | chr1: 37484242-37484269 |
| ZC3H12A 50 | chr1: 37483908-37483935 |
| ZC3H12A 51 | chr1: 37482714-37482741 |
| ZC3H12A 52 | chr1: 37483655-37483682 |
| ZC3H12A 53 | chr1: 37484164-37484191 |
| ZC3H12A 54 | chr1: 37482717-37482744 |
| ZC3H12A 55 | chr1: 37484326-37484353 |
| ZC3H12A 56 | chr1: 37483915-37483942 |
| ZC3H12A 57 | chr1: 37481749-37481776 |
| ZC3H12A 58 | chr1: 37481643-37481670 |
| ZC3H12A 59 | chr1: 37481774-37481801 |
| ZC3H12A 60 | chr1: 37481704-37481731 |
| ZC3H12A 61 | chr1: 37481638-37481665 |
| ZC3H12A 62 | chr1: 37475770-37475797 |
| ZC3H12A 63 | chr1: 37475771-37475798 |
| ZC3H12A 64 | chr1: 37475814-37475841 |
| ZC3H12A 65 | chr1: 37475804-37475831 |
| ZC3H12A 66 | chr1: 37481711-37481738 |
| ZC3H12A 67 | chr1: 37481715-37481742 |
| ZC3H12A 68 | chr1: 37483342-37483369 |

TABLE 2C
Human SOCS1 genomic coordinate for multiple knockout

| Target No. | Target coordinate range |
|---|---|
| SOCS1 1 | chr16: 11256040-11256067 |
| SOCS1 2 | chr16: 11256041-11256068 |
| SOCS1 3 | chr16: 11256046-11256073 |
| SOCS1 4 | chr16: 11256055-11256082 |
| SOCS1 5 | chr16: 11256047-11256074 |
| SOCS1 6 | chr16: 11256050-11256077 |
| SOCS1 7 | chr16: 11256051-11256078 |
| SOCS1 8 | chr16: 11256054-11256081 |
| SOCS1 9 | chr16: 11256057-11256084 |
| SOCS1 10 | chr16: 11256062-11256089 |
| SOCS1 11 | chr16: 11256063-11256090 |
| SOCS1 12 | chr16: 11256069-11256096 |
| SOCS1 13 | chr16: 11256070-11256097 |
| SOCS1 14 | chr16: 11256078-11256105 |
| SOCS1 15 | chr16: 11256034-11256061 |
| SOCS1 16 | chr16: 11256035-11256062 |
| SOCS1 17 | chr16: 11256036-11256063 |
| SOCS1 18 | chr16: 11256039-11256066 |
| SOCS1 19 | chr16: 11256040-11256067 |
| SOCS1 20 | chr16: 11256043-11256070 |
| SOCS1 21 | chr16: 11256046-11256073 |
| SOCS1 22 | chr16: 11255545-11255572 |
| SOCS1 23 | chr16: 11255546-11255573 |
| SOCS1 24 | chr16: 11255550-11255577 |
| SOCS1 25 | chr16: 11255521-11255548 |
| SOCS1 26 | chr16: 11255529-11255556 |
| SOCS1 27 | chr16: 11255530-11255557 |
| SOCS1 28 | chr16: 11255531-11255558 |
| SOCS1 29 | chr16: 11255539-11255566 |
| SOCS1 30 | chr16: 11255540-11255567 |
| SOCS1 31 | chr16: 11255541-11255568 |
| SOCS1 32 | chr16: 11255507-11255534 |
| SOCS1 33 | chr16: 11255508-11255535 |
| SOCS1 34 | chr16: 11255569-11255596 |
| SOCS1 35 | chr16: 11255494-11255521 |
| SOCS1 36 | chr16: 11255495-11255522 |
| SOCS1 37 | chr16: 11255496-11255523 |
| SOCS1 38 | chr16: 11255497-11255524 |
| SOCS1 39 | chr16: 11255492-11255519 |
| SOCS1 40 | chr16: 11255496-11255523 |
| SOCS1 41 | chr16: 11255509-11255536 |
| SOCS1 42 | chr16: 11255518-11255545 |
| SOCS1 43 | chr16: 11255287-11255314 |
| SOCS1 44 | chr16: 11255225-11255252 |
| SOCS1 45 | chr16: 11255234-11255261 |
| SOCS1 46 | chr16: 11255235-11255262 |
| SOCS1 47 | chr16: 11255236-11255263 |
| SOCS1 48 | chr16: 11255246-11255273 |
| SOCS1 49 | chr16: 11255460-11255487 |
| SOCS1 50 | chr16: 11255411-11255438 |

[symbol]

2D Human CBLB genomic coordinate for multiple knockout

| Target No. | Target coordinate range |
|---|---|
| CBLB 1 | chr3: 105659004-105659031 |
| CBLB 2 | chr3: 105656012-105656039 |
| CBLB 3 | chr3: 105656625-105656652 |
| CBLB 4 | chr3: 105657901-105657928 |
| CBLB 5 | chr3: 105658802-105658829 |
| CBLB 6 | chr3: 105658456-105658483 |
| CBLB 7 | chr3: 105657189-105657216 |
| CBLB 8 | chr3: 105657915-105657942 |
| CBLB 9 | chr3: 105658570-105658597 |
| CBLB 10 | chr3: 105658562-105658589 |
| CBLB 11 | chr3: 105658451-105658478 |
| CBLB 12 | chr3: 105659074-105659101 |
| CBLB 13 | chr3: 105657096-105657123 |
| CBLB 14 | chr3: 105656554-105656581 |
| CBLB 15 | chr3: 105658839-105658866 |
| CBLB 16 | chr3: 105658045-105658072 |
| CBLB 17 | chr3: 105656369-105656396 |
| CBLB 18 | chr3: 105657033-105657060 |
| CBLB 19 | chr3: 105656191-105656218 |
| CBLB 20 | chr3: 105658194-105658221 |
| CBLB 21 | chr3: 105659003-105659030 |
| CBLB 22 | chr3: 105657190-105657217 |
| CBLB 23 | chr3: 105658561-105658588 |
| CBLB 24 | chr3: 105657254-105657281 |
| CBLB 25 | chr3: 105657856-105657883 |
| CBLB 26 | chr3: 105656182-105656209 |
| CBLB 27 | chr3: 105657914-105657941 |
| CBLB 28 | chr3: 105656622-105656649 |
| CBLB 29 | chr3: 105658140-105658167 |
| CBLB 30 | chr3: 105655949-105655976 |
| CBLB 31 | chr3: 105657184-105657211 |
| CBLB 32 | chr3: 105658450-105658477 |
| CBLB 33 | chr3: 105657034-105657061 |
| CBLB 34 | chr3: 105658991-105659018 |
| CBLB 35 | chr3: 105658994-105659021 |
| CBLB 36 | chr3: 105657095-105657122 |
| CBLB 37 | chr3: 105658523-105658550 |
| CBLB 38 | chr3: 105656558-105656585 |
| CBLB 39 | chr3: 105657893-105657920 |
| CBLB 40 | chr3: 105659058-105659085 |
| CBLB 41 | chr3: 105658960-105658987 |
| CBLB 42 | chr3: 105657111-105657138 |
| CBLB 43 | chr3: 105656000-105656027 |
| CBLB 44 | chr3: 105657144-105657171 |
| CBLB 45 | chr3: 105657102-105657129 |
| CBLB 46 | chr3: 105658584-105658611 |
| CBLB 47 | chr3: 105658526-105658553 |
| CBLB 48 | chr3: 105657847-105657874 |
| CBLB 49 | chr3: 105658840-105658867 |
| CBLB 50 | chr3: 105655702-105655729 |
| CBLB 51 | chr3: 105657258-105657285 |
| CBLB 52 | chr3: 105658790-105658817 |
| CBLB 53 | chr3: 105658845-105658872 |
| CBLB 54 | chr3: 105658192-105658219 |
| CBLB 55 | chr3: 105656181-105656208 |
| CBLB 56 | chr3: 105657497-105657524 |
| CBLB 57 | chr3: 105657501-105657528 |
| CBLB 58 | chr3: 105658842-105658869 |
| CBLB 59 | chr3: 105657035-105657062 |
| CBLB 60 | chr3: 105658527-105658554 |
| CBLB 61 | chr3: 105656621-105656648 |
| CBLB 62 | chr3: 105655999-105656026 |
| CBLB 63 | chr3: 105656201-105656228 |
| CBLB 64 | chr3: 105658575-105658602 |
| CBLB 65 | chr3: 105657038-105657065 |
| CBLB 66 | chr3: 105658172-105658199 |
| CBLB 67 | chr3: 105658972-105658999 |
| CBLB 68 | chr3: 105658040-105658067 |
| CBLB 69 | chr3: 105658171-105658198 |
| CBLB 70 | chr3: 105746011-105746038 |
| CBLB 71 | chr3: 105751603-105751630 |

TABLE 3A
Human TNFAIP3 genomic coordinate of the present invention

| No. | Chromosomal coordinate range |
|---|---|
| TP sk 1 | chr6: 137864855-137864882 |
| TP sk 2 | chr6: 137864856-137864883 |
| TP sk 3 | chr6: 137864857-137864884 |
| TP sk 4 | chr6: 137864863-137864890 |
| TP sk 5 | chr6: 137864872-137864899 |
| TP sk 6 | chr6: 137864895-137864922 |
| TP sk 7 | chr6: 137864910-137864937 |
| TP sk 8 | chr6: 137864928-137864955 |
| TP sk 9 | chr6: 137864931-137864958 |
| TP sk 10 | chr6: 137864940-137864967 |
| TP sk 11 | chr6: 137864959-137864986 |
| TP sk 12 | chr6: 137864960-137864987 |
| TP sk 13 | chr6: 137864961-137864988 |
| TP sk 14 | chr6: 137864965-137864992 |
| TP sk 15 | chr6: 137864967-137864994 |
| TP sk 16 | chr6: 137864972-137864999 |
| TP sk 17 | chr6: 137864973-137865000 |
| TP sk 18 | chr6: 137865003-137865030 |
| TP sk 19 | chr6: 137865006-137865033 |
| TP sk 20 | chr6: 137865007-137865034 |
| TP sk 21 | chr6: 137865011-137865038 |
| TP sk 22 | chr6: 137865029-137865056 |
| TP sk 23 | chr6: 137865032-137865059 |
| TP sk 24 | chr6: 137865035-137865062 |
| TP sk 25 | chr6: 137865036-137865063 |
| TP sk 26 | chr6: 137865041-137865068 |
| TP sk 27 | chr6: 137865049-137865076 |
| TP sk 28 | chr6: 137865052-137865079 |
| TP sk 29 | chr6: 137865071-137865098 |
| TP sk 30 | chr6: 137865078-137865105 |
| TP sk 31 | chr6: 137865080-137865107 |
| TP sk 32 | chr6: 137865081-137865108 |
| TP sk 33 | chr6: 137865097-137865124 |
| TP sk 34 | chr6: 137865098-137865125 |
| TP sk 35 | chr6: 137865120-137865147 |
| TP sk 36 | chr6: 137865133-137865160 |
| TP sk 37 | chr6: 137865138-137865165 |
| TP sk 38 | chr6: 137865148-137865175 |
| TP sk 39 | chr6: 137865152-137865179 |
| TP sk 40 | chr6: 137865158-137865185 |
| TP sk 41 | chr6: 137865171-137865198 |
| TP sk 42 | chr6: 137865178-137865205 |
| TP sk 43 | chr6: 137865186-137865213 |
| TP sk 44 | chr6: 137865192-137865219 |
| TP sk 45 | chr6: 137865196-137865223 |
| TP sk 46 | chr6: 137865207-137865234 |
| TP sk 47 | chr6: 137865216-137865243 |
| TP sk 48 | chr6: 137865235-137865262 |
| TP sk 49 | chr6: 137865236-137865263 |
| TP sk 50 | chr6: 137865237-137865264 |
| TP sk 51 | chr6: 137865253-137865280 |
| TP sk 52 | chr6: 137865268-137865295 |
| TP sk 53 | chr6: 137865269-137865296 |
| TP sk 54 | chr6: 137865282-137865309 |
| TP sk 55 | chr6: 137865283-137865310 |
| TP sk 56 | chr6: 137865284-137865311 |
| TP sk 57 | chr6: 137865290-137865317 |
| TP sk 58 | chr6: 137865300-137865327 |
| TP sk 59 | chr6: 137865301-137865328 |
| TP sk 60 | chr6: 137865303-137865330 |
| TP sk 61 | chr6: 137865316-137865343 |
| TP sk 62 | chr6: 137865332-137865359 |
| TP sk 63 | chr6: 137865339-137865366 |
| TP sk 64 | chr6: 137865346-137865373 |
| TP sk 65 | chr6: 137865358-137865385 |
| TP sk 66 | chr6: 137865367-137865394 |
| TP sk 67 | chr6: 137865370-137865397 |
| TP sk 68 | chr6: 137865377-137865404 |
| TP sk 69 | chr6: 137865384-137865411 |
| TP sk 70 | chr6: 137865390-137865417 |
| TP sk 71 | chr6: 137865402-137865429 |
| TP sk 72 | chr6: 137865403-137865430 |
| TP sk 73 | chr6: 137865421-137865448 |
| TP sk 74 | chr6: 137865450-137865477 |
| TP sk 75 | chr6: 137865453-137865480 |
| TP sk 76 | chr6: 137865457-137865484 |
| TP sk 77 | chr6: 137865464-137865491 |
| TP sk 78 | chr6: 137865472-137865499 |
| TP sk 79 | chr6: 137865473-137865500 |
| TP sk 80 | chr6: 137865484-137865511 |
| TP sk 81 | chr6: 137865497-137865524 |
| TP sk 82 | chr6: 137865503-137865530 |
| TP sk 83 | chr6: 137865504-137865531 |
| TP sk 84 | chr6: 137865509-137865536 |
| TP sk 85 | chr6: 137865511-137865538 |
| TP sk 86 | chr6: 137865520-137865547 |
| TP sk 87 | chr6: 137865533-137865560 |
| TP sk 88 | chr6: 137865537-137865564 |
| TP sk 89 | chr6: 137865538-137865565 |
| TP sk 90 | chr6: 137865545-137865572 |
| TP sk 91 | chr6: 137865572-137865599 |
| TP sk 92 | chr6: 137865576-137865603 |
| TP sk 93 | chr6: 137865587-137865614 |
| TP sk 94 | chr6: 137865592-137865619 |
| TP sk 95 | chr6: 137865606-137865633 |
| TP sk 96 | chr6: 137865615-137865642 |
| TP sk 97 | chr6: 137865616-137865643 |
| TP sk 98 | chr6: 137865622-137865649 |
| TP sk 99 | chr6: 137865633-137865660 |
| TP sk 100 | chr6: 137865647-137865674 |
| TP sk 101 | chr6: 137865665-137865692 |
| TP sk 102 | chr6: 137865668-137865695 |
| TP sk 103 | chr6: 137865671-137865698 |
| TP sk 104 | chr6: 137865678-137865705 |
| TP sk 105 | chr6: 137865679-137865706 |
| TP sk 106 | chr6: 137865683-137865710 |
| TP sk 107 | chr6: 137865684-137865711 |
| TP sk 108 | chr6: 137865685-137865712 |
| TP sk 109 | chr6: 137865713-137865740 |
| TP sk 110 | chr6: 137865728-137865755 |
| TP sk 111 | chr6: 137865783-137865810 |
| TP sk 112 | chr6: 137865787-137865814 |
| TP sk 113 | chr6: 137865788-137865815 |
| TP sk 114 | chr6: 137865795-137865822 |
| TP sk 115 | chr6: 137865805-137865832 |
| TP sk 116 | chr6: 137865806-137865833 |
| TP sk 117 | chr6: 137865809-137865836 |
| TP sk 118 | chr6: 137865814-137865841 |
| TP sk 119 | chr6: 137865824-137865851 |
| TP sk 120 | chr6: 137865849-137865876 |
| TP sk 121 | chr6: 137865866-137865893 |
| TP sk 122 | chr6: 137865881-137865908 |
| TP sk 123 | chr6: 137865886-137865913 |
| TP sk 124 | chr6: 137865892-137865919 |
| TP sk 125 | chr6: 137865911-137865938 |
| TP sk 126 | chr6: 137865926-137865953 |
| TP sk 127 | chr6: 137865928-137865955 |
| TP sk 128 | chr6: 137865932-137865959 |
| TP sk 129 | chr6: 137865943-137865970 |
| TP sk 130 | chr6: 137865955-137865982 |
| TP sk 131 | chr6: 137865971-137865998 |
| TP sk 132 | chr6: 137865990-137866017 |
| TP sk 133 | chr6: 137866005-137866032 |
| TP sk 134 | chr6: 137866016-137866043 |
| TP sk 135 | chr6: 137866019-137866046 |
| TP sk 136 | chr6: 137866020-137866047 |
| TP sk 137 | chr6: 137866023-137866050 |
| TP sk 138 | chr6: 137866027-137866054 |
| TP sk 139 | chr6: 137866031-137866058 |
| TP sk 140 | chr6: 137866032-137866059 |
| TP sk 141 | chr6: 137866033-137866060 |
| TP sk 142 | chr6: 137866034-137866061 |
| TP sk 143 | chr6: 137866035-137866062 |
| TP sk 144 | chr6: 137866037-137866064 |
| TP sk 145 | chr6: 137866038-137866065 |
| TP sk 146 | chr6: 137866039-137866066 |
| TP sk 147 | chr6: 137866040-137866067 |
| TP sk 148 | chr6: 137866042-137866069 |
| TP sk 149 | chr6: 137866045-137866072 |
| TP sk 150 | chr6: 137866054-137866081 |
| TP sk 151 | chr6: 137866078-137866105 |
| TP sk 152 | chr6: 137866092-137866119 |
| TP sk 153 | chr6: 137866106-137866133 |
| TP sk 154 | chr6: 137866108-137866135 |
| TP sk 155 | chr6: 137866109-137866136 |
| TP sk 156 | chr6: 137866110-137866137 |
| TP sk 157 | chr6: 137866137-137866164 |
| TP sk 158 | chr6: 137866139-137866166 |
| TP sk 159 | chr6: 137866157-137866184 |
| TP sk 160 | chr6: 137866161-137866188 |
| TP sk 161 | chr6: 137866172-137866199 |
| TP sk 162 | chr6: 137866173-137866200 |
| TP sk 163 | chr6: 137866176-137866203 |
| TP sk 164 | chr6: 137866188-137866215 |
| TP sk 165 | chr6: 137866189-137866216 |
| TP sk 166 | chr6: 137866193-137866220 |
| TP sk 167 | chr6: 137866202-137866229 |
| TP sk 168 | chr6: 137866203-137866230 |
| TP sk 169 | chr6: 137866236-137866263 |
| TP sk 170 | chr6: 137866237-137866264 |
| TP sk 171 | chr6: 137866246-137866273 |
| TP sk 172 | chr6: 137866249-137866276 |
| TP sk 173 | chr6: 137866250-137866277 |
| TP sk 174 | chr6: 137866254-137866281 |
| TP sk 175 | chr6: 137866255-137866282 |
| TP sk 176 | chr6: 137866256-137866283 |
| TP sk 177 | chr6: 137866257-137866284 |
| TP sk 178 | chr6: 137866261-137866288 |
| TP sk 179 | chr6: 137866267-137866294 |
| TP sk 180 | chr6: 137866268-137866295 |
| TP sk 181 | chr6: 137866269-137866296 |
| TP sk 182 | chr6: 137866270-137866297 |
| TP sk 183 | chr6: 137866276-137866303 |
| TP sk 184 | chr6: 137866277-137866304 |
| TP sk 185 | chr6: 137866291-137866318 |
| TP sk 186 | chr6: 137866297-137866324 |
| TP sk 187 | chr6: 137866302-137866329 |
| TP sk 188 | chr6: 137866303-137866330 |
| TP sk 189 | chr6: 137866304-137866331 |
| TP sk 190 | chr6: 137866305-137866332 |
| TP sk 191 | chr6: 137866309-137866336 |
| TP sk 192 | chr6: 137866310-137866337 |
| TP sk 193 | chr6: 137866313-137866340 |
| TP sk 194 | chr6: 137866314-137866341 |
| TP sk 195 | chr6: 137866347-137866374 |
| TP sk 196 | chr6: 137866348-137866375 |
| TP sk 197 | chr6: 137866349-137866376 |
| TP sk 198 | chr6: 137866360-137866387 |
| TP sk 199 | chr6: 137866365-137866392 |
| TP sk 200 | chr6: 137866369-137866396 |
| TP sk 201 | chr6: 137866370-137866397 |
| TP sk 202 | chr6: 137866396-137866423 |
| TP sk 203 | chr6: 137866406-137866433 |
| TP sk 204 | chr6: 137866408-137866435 |
| TP sk 205 | chr6: 137866418-137866445 |
| TP sk 206 | chr6: 137866421-137866448 |
| TP sk 207 | chr6: 137866440-137866467 |
| TP sk 208 | chr6: 137866473-137866500 |
| TP sk 209 | chr6: 137866481-137866508 |
| TP sk 210 | chr6: 137866500-137866527 |
| TP sk 211 | chr6: 137866501-137866528 |
| TP sk 212 | chr6: 137866502-137866529 |
| TP sk 213 | chr6: 137866508-137866535 |
| TP sk 214 | chr6: 137866519-137866546 |
| TP sk 215 | chr6: 137866525-137866552 |
| TP sk 216 | chr6: 137866526-137866553 |
| TP sk 217 | chr6: 137866527-137866554 |
| TP sk 218 | chr6: 137866565-137866592 |
| TP sk 219 | chr6: 137866566-137866593 |
| TP sk 220 | chr6: 137866567-137866594 |
| TP sk 221 | chr6: 137866572-137866599 |
| TP sk 222 | chr6: 137866573-137866600 |
| TP sk 223 | chr6: 137866574-137866601 |
| TP sk 224 | chr6: 137866575-137866602 |
| TP sk 225 | chr6: 137866579-137866606 |
| TP sk 226 | chr6: 137866580-137866607 |
| TP sk 227 | chr6: 137866582-137866609 |
| TP sk 228 | chr6: 137866590-137866617 |
| TP sk 229 | chr6: 137866591-137866618 |
| TP sk 230 | chr6: 137866595-137866622 |
| TP sk 231 | chr6: 137866611-137866638 |
| TP sk 232 | chr6: 137866612-137866639 |
| TP sk 233 | chr6: 137866613-137866640 |
| TP sk 234 | chr6: 137866614-137866641 |
| TP sk 235 | chr6: 137866615-137866642 |
| TP sk 236 | chr6: 137866620-137866647 |
| TP sk 237 | chr6: 137866626-137866653 |
| TP sk 238 | chr6: 137866630-137866657 |
| TP sk 239 | chr6: 137866636-137866663 |
| TP sk 240 | chr6: 137866638-137866665 |
| TP sk 241 | chr6: 137866644-137866671 |
| TP sk 242 | chr6: 137866645-137866672 |
| TP sk 243 | chr6: 137866646-137866673 |
| TP sk 244 | chr6: 137866654-137866681 |
| TP sk 245 | chr6: 137866675-137866702 |
| TP sk 246 | chr6: 137866688-137866715 |
| TP sk 247 | chr6: 137866690-137866717 |
| TP sk 248 | chr6: 137866691-137866718 |
| TP sk 249 | chr6: 137866701-137866728 |
| TP sk 250 | chr6: 137866702-137866729 |
| TP sk 251 | chr6: 137866703-137866730 |
| TP sk 252 | chr6: 137866709-137866736 |
| TP sk 253 | chr6: 137866710-137866737 |
| TP sk 254 | chr6: 137866713-137866740 |
| TP sk 255 | chr6: 137866714-137866741 |
| TP sk 256 | chr6: 137866720-137866747 |
| TP sk 257 | chr6: 137866733-137866760 |
| TP sk 258 | chr6: 137866734-137866761 |
| TP sk 259 | chr6: 137866737-137866764 |
| TP sk 260 | chr6: 137866753-137866780 |
| TP sk 261 | chr6: 137866760-137866787 |
| TP sk 262 | chr6: 137866761-137866788 |
| TP sk 263 | chr6: 137866762-137866789 |
| TP sk 264 | chr6: 137866767-137866794 |
| TP sk 265 | chr6: 137866768-137866795 |
| TP sk 266 | chr6: 137866773-137866800 |
| TP sk 267 | chr6: 137866774-137866801 |
| TP sk 268 | chr6: 137866777-137866804 |
| TP sk 269 | chr6: 137866781-137866808 |
| TP sk 270 | chr6: 137866782-137866809 |
| TP sk 271 | chr6: 137866785-137866812 |
| TP sk 272 | chr6: 137866788-137866815 |
| TP sk 273 | chr6: 137866793-137866820 |
| TP sk 274 | chr6: 137866794-137866821 |
| TP sk 275 | chr6: 137866796-137866823 |
| TP sk 276 | chr6: 137866797-137866824 |
| TP sk 277 | chr6: 137866804-137866831 |
| TP sk 278 | chr6: 137866841-137866868 |
| TP sk 279 | chr6: 137866842-137866869 |
| TP sk 280 | chr6: 137866854-137866881 |
| TP sk 281 | chr6: 137866898-137866925 |
| TP sk 282 | chr6: 137866910-137866937 |
| TP sk 283 | chr6: 137866912-137866939 |
| TP sk 284 | chr6: 137866916-137866943 |
| TP sk 285 | chr6: 137866917-137866944 |
| TP sk 286 | chr6: 137866923-137866950 |
| TP sk 287 | chr6: 137866932-137866959 |
| TP sk 288 | chr6: 137866946-137866973 |
| TP sk 289 | chr6: 137866951-137866978 |
| TP sk 290 | chr6: 137866952-137866979 |
| TP sk 291 | chr6: 137866953-137866980 |
| TP sk 292 | chr6: 137866958-137866985 |
| TP sk 293 | chr6: 137866959-137866986 |
| TP sk 294 | chr6: 137866960-137866987 |
| TP sk 295 | chr6: 137866968-137866995 |
| TP sk 296 | chr6: 137866969-137866996 |
| TP sk 297 | chr6: 137866970-137866997 |
| TP sk 298 | chr6: 137866971-137866998 |
| TP sk 299 | chr6: 137867251-137867278 |
| TP sk 300 | chr6: 137867254-137867281 |
| TP sk 301 | chr6: 137867255-137867282 |
| TP sk 302 | chr6: 137867269-137867296 |
| TP sk 303 | chr6: 137867278-137867305 |
| TP sk 304 | chr6: 137867279-137867306 |
| TP sk 305 | chr6: 137867280-137867307 |
| TP sk 306 | chr6: 137867281-137867308 |
| TP sk 307 | chr6: 137867283-137867310 |
| TP sk 308 | chr6: 137867284-137867311 |
| TP sk 309 | chr6: 137867289-137867316 |
| TP sk 310 | chr6: 137867298-137867325 |
| TP sk 311 | chr6: 137867299-137867326 |
| TP sk 312 | chr6: 137867300-137867327 |
| TP sk 313 | chr6: 137867326-137867353 |
| TP sk 314 | chr6: 137867329-137867356 |
| TP sk 315 | chr6: 137867344-137867371 |
| TP sk 316 | chr6: 137867345-137867372 |
| TP sk 317 | chr6: 137867346-137867373 |
| TP sk 318 | chr6: 137867347-137867374 |
| TP sk 319 | chr6: 137867351-137867378 |
| TP sk 320 | chr6: 137867355-137867382 |
| TP sk 321 | chr6: 137867356-137867383 |
| TP sk 322 | chr6: 137867360-137867387 |
| TP sk 323 | chr6: 137867365-137867392 |
| TP sk 324 | chr6: 137867372-137867399 |
| TP sk 325 | chr6: 137867373-137867400 |
| TP sk 326 | chr6: 137867377-137867404 |
| TP sk 327 | chr6: 137867378-137867405 |
| TP sk 328 | chr6: 137867379-137867406 |
| TP sk 329 | chr6: 137867383-137867410 |
| TP sk 330 | chr6: 137867387-137867414 |
| TP sk 331 | chr6: 137867400-137867427 |
| TP sk 332 | chr6: 137867403-137867430 |
| TP sk 333 | chr6: 137867406-137867433 |
| TP sk 334 | chr6: 137867407-137867434 |
| TP sk 335 | chr6: 137867408-137867435 |
| TP sk 336 | chr6: 137867412-137867439 |
| TP sk 337 | chr6: 137867413-137867440 |
| TP sk 338 | chr6: 137867417-137867444 |
| TP sk 339 | chr6: 137867418-137867445 |
| TP sk 340 | chr6: 137867419-137867446 |
| TP sk 341 | chr6: 137867423-137867450 |
| TP sk 342 | chr6: 137867424-137867451 |
| TP sk 343 | chr6: 137867425-137867452 |
| TP sk 344 | chr6: 137867426-137867453 |
| TP sk 345 | chr6: 137867429-137867456 |
| TP sk 346 | chr6: 137867435-137867462 |
| TP sk 347 | chr6: 137867436-137867463 |
| TP sk 348 | chr6: 137867442-137867469 |
| TP sk 349 | chr6: 137867446-137867473 |
| TP sk 350 | chr6: 137867449-137867476 |
| TP sk 351 | chr6: 137867452-137867479 |
| TP sk 352 | chr6: 137867456-137867483 |
| TP sk 353 | chr6: 137867457-137867484 |
| TP sk 354 | chr6: 137867458-137867485 |
| TP sk 355 | chr6: 137867463-137867490 |
| TP sk 356 | chr6: 137867468-137867495 |
| TP sk 357 | chr6: 137867486-137867513 |
| TP sk 358 | chr6: 137867487-137867514 |
| TP sk 359 | chr6: 137867492-137867519 |
| TP sk 360 | chr6: 137867499-137867526 |
| TP sk 361 | chr6: 137867502-137867529 |
| TP sk 362 | chr6: 137867507-137867534 |
| TP sk 363 | chr6: 137867510-137867537 |
| TP sk 364 | chr6: 137867511-137867538 |
| TP sk 365 | chr6: 137867516-137867543 |
| TP sk 366 | chr6: 137867523-137867550 |
| TP sk 367 | chr6: 137867526-137867553 |
| TP sk 368 | chr6: 137867531-137867558 |
| TP sk 369 | chr6: 137867534-137867561 |
| TP sk 370 | chr6: 137867535-137867562 |
| TP sk 371 | chr6: 137867547-137867574 |
| TP sk 372 | chr6: 137867550-137867577 |
| TP sk 373 | chr6: 137867551-137867578 |
| TP sk 374 | chr6: 137867555-137867582 |
| TP sk 375 | chr6: 137867558-137867585 |
| TP sk 376 | chr6: 137867559-137867586 |
| TP sk 377 | chr6: 137867560-137867587 |
| TP sk 378 | chr6: 137867565-137867592 |
| TP sk 379 | chr6: 137867567-137867594 |
| TP sk 380 | chr6: 137867568-137867595 |
| TP sk 381 | chr6: 137867572-137867599 |
| TP sk 382 | chr6: 137867574-137867601 |
| TP sk 383 | chr6: 137867575-137867602 |
| TP sk 384 | chr6: 137867583-137867610 |
| TP sk 385 | chr6: 137867585-137867612 |
| TP sk 386 | chr6: 137867586-137867613 |
| TP sk 387 | chr6: 137867599-137867626 |
| TP sk 388 | chr6: 137867600-137867627 |
| TP sk 389 | chr6: 137867604-137867631 |
| TP sk 390 | chr6: 137867618-137867645 |
| TP sk 391 | chr6: 137867620-137867647 |
| TP sk 392 | chr6: 137867621-137867648 |
| TP sk 393 | chr6: 137867622-137867649 |
| TP sk 394 | chr6: 137867623-137867650 |
| TP sk 395 | chr6: 137867624-137867651 |
| TP sk 396 | chr6: 137867634-137867661 |
| TP sk 397 | chr6: 137867641-137867668 |
| TP sk 398 | chr6: 137867646-137867673 |
| TP sk 399 | chr6: 137867647-137867674 |
| TP sk 400 | chr6: 137867657-137867684 |
| TP sk 401 | chr6: 137867664-137867691 |
| TP sk 402 | chr6: 137867671-137867698 |
| TP sk 403 | chr6: 137867672-137867699 |
| TP sk 404 | chr6: 137867686-137867713 |
| TP sk 405 | chr6: 137867687-137867714 |
| TP sk 406 | chr6: 137867695-137867722 |
| TP sk 407 | chr6: 137867710-137867737 |
| TP sk 408 | chr6: 137867714-137867741 |
| TP sk 409 | chr6: 137867728-137867755 |
| TP sk 410 | chr6: 137867750-137867777 |
| TP sk 411 | chr6: 137867751-137867778 |
| TP sk 412 | chr6: 137867759-137867786 |
| TP sk 413 | chr6: 137867762-137867789 |
| TP sk 414 | chr6: 137867766-137867793 |
| TP sk 415 | chr6: 137867775-137867802 |
| TP sk 416 | chr6: 137867788-137867815 |
| TP sk 417 | chr6: 137867796-137867823 |
| TP sk 418 | chr6: 137867806-137867833 |
| TP sk 419 | chr6: 137867807-137867834 |
| TP sk 420 | chr6: 137867819-137867846 |
| TP sk 421 | chr6: 137867820-137867847 |
| TP sk 422 | chr6: 137867823-137867850 |
| TP sk 423 | chr6: 137867826-137867853 |
| TP sk 424 | chr6: 137867827-137867854 |
| TP sk 425 | chr6: 137867828-137867855 |
| TP sk 426 | chr6: 137867830-137867857 |
| TP sk 427 | chr6: 137867835-137867862 |
| TP sk 428 | chr6: 137867836-137867863 |
| TP sk 429 | chr6: 137867839-137867866 |
| TP sk 430 | chr6: 137867858-137867885 |
| TP sk 431 | chr6: 137867867-137867894 |
| TP sk 432 | chr6: 137867881-137867908 |
| TP sk 433 | chr6: 137867888-137867915 |
| TP sk 434 | chr6: 137867909-137867936 |
| TP sk 435 | chr6: 137867918-137867945 |
| TP sk 436 | chr6: 137867930-137867957 |
| TP sk 437 | chr6: 137867943-137867970 |
| TP sk 438 | chr6: 137867944-137867971 |
| TP sk 439 | chr6: 137867945-137867972 |
| TP sk 440 | chr6: 137867951-137867978 |
| TP sk 441 | chr6: 137867952-137867979 |
| TP sk 442 | chr6: 137867959-137867986 |
| TP sk 443 | chr6: 137867963-137867990 |
| TP sk 444 | chr6: 137867964-137867991 |
| TP sk 445 | chr6: 137867975-137868002 |
| TP sk 446 | chr6: 137867978-137868005 |
| TP sk 447 | chr6: 137867981-137868008 |
| TP sk 448 | chr6: 137867982-137868009 |
| TP sk 449 | chr6: 137867984-137868011 |
| TP sk 450 | chr6: 137867985-137868012 |
| TP sk 451 | chr6: 137867986-137868013 |
| TP sk 452 | chr6: 137867987-137868014 |
| TP sk 453 | chr6: 137867988-137868015 |
| TP sk 454 | chr6: 137867991-137868018 |
| TP sk 455 | chr6: 137867994-137868021 |
| TP sk 456 | chr6: 137867998-137868025 |
| TP sk 457 | chr6: 137867999-137868026 |
| TP sk 458 | chr6: 137868023-137868050 |
| TP sk 459 | chr6: 137868024-137868051 |
| TP sk 460 | chr6: 137868025-137868052 |
| TP sk 461 | chr6: 137868035-137868062 |
| TP sk 462 | chr6: 137868036-137868063 |
| TP sk 463 | chr6: 137868037-137868064 |
| TP sk 464 | chr6: 137868038-137868065 |
| TP sk 465 | chr6: 137868042-137868069 |
| TP sk 466 | chr6: 137868043-137868070 |
| TP sk 467 | chr6: 137868044-137868071 |
| TP sk 468 | chr6: 137868050-137868077 |
| TP sk 469 | chr6: 137868054-137868081 |
| TP sk 470 | chr6: 137868055-137868082 |
| TP sk 471 | chr6: 137868056-137868083 |
| TP sk 472 | chr6: 137868057-137868084 |
| TP sk 473 | chr6: 137868073-137868100 |
| TP sk 474 | chr6: 137868095-137868122 |
| TP sk 475 | chr6: 137868108-137868135 |
| TP sk 476 | chr6: 137868109-137868136 |
| TP sk 477 | chr6: 137868116-137868143 |
| TP sk 478 | chr6: 137868142-137868169 |
| TP sk 479 | chr6: 137868144-137868171 |
| TP sk 480 | chr6: 137868145-137868172 |
| TP sk 481 | chr6: 137868146-137868173 |
| TP sk 482 | chr6: 137868152-137868179 |
| TP sk 483 | chr6: 137868156-137868183 |
| TP sk 484 | chr6: 137868157-137868184 |
| TP sk 485 | chr6: 137868158-137868185 |
| TP sk 486 | chr6: 137868162-137868189 |
| TP sk 487 | chr6: 137868163-137868190 |
| TP sk 488 | chr6: 137868164-137868191 |
| TP sk 489 | chr6: 137868189-137868216 |
| TP sk 490 | chr6: 137868198-137868225 |
| TP sk 491 | chr6: 137868199-137868226 |
| TP sk 492 | chr6: 137868205-137868232 |
| TP sk 493 | chr6: 137868208-137868235 |
| TP sk 494 | chr6: 137868209-137868236 |
| TP sk 495 | chr6: 137868212-137868239 |
| TP sk 496 | chr6: 137868217-137868244 |
| TP sk 497 | chr6: 137868220-137868247 |
| TP sk 498 | chr6: 137868224-137868251 |
| TP sk 499 | chr6: 137870815-137870842 |
| TP sk 500 | chr6: 137870818-137870845 |
| TP sk 501 | chr6: 137870819-137870846 |
| TP sk 502 | chr6: 137870822-137870849 |
| TP sk 503 | chr6: 137870823-137870850 |
| TP sk 504 | chr6: 137870824-137870851 |
| TP sk 505 | chr6: 137870825-137870852 |
| TP sk 506 | chr6: 137870831-137870858 |
| TP sk 507 | chr6: 137870838-137870865 |
| TP sk 508 | chr6: 137870839-137870866 |
| TP sk 509 | chr6: 137870850-137870877 |
| TP sk 510 | chr6: 137870851-137870878 |
| TP sk 511 | chr6: 137870859-137870886 |
| TP sk 512 | chr6: 137870885-137870912 |
| TP sk 513 | chr6: 137870886-137870913 |
| TP sk 514 | chr6: 137870890-137870917 |
| TP sk 515 | chr6: 137870894-137870921 |
| TP sk 516 | chr6: 137871026-137871053 |
| TP sk 517 | chr6: 137871027-137871054 |
| TP sk 518 | chr6: 137871028-137871055 |
| TP sk 519 | chr6: 137871033-137871060 |
| TP sk 520 | chr6: 137871044-137871071 |
| TP sk 521 | chr6: 137871045-137871072 |
| TP sk 522 | chr6: 137871053-137871080 |
| TP sk 523 | chr6: 137871056-137871083 |
| TP sk 524 | chr6: 137871067-137871094 |
| TP sk 525 | chr6: 137871068-137871095 |
| TP sk 526 | chr6: 137871081-137871108 |
| TP sk 527 | chr6: 137871082-137871109 |
| TP sk 528 | chr6: 137871096-137871123 |
| TP sk 529 | chr6: 137871104-137871131 |
| TP sk 530 | chr6: 137871105-137871132 |
| TP sk 531 | chr6: 137871106-137871133 |
| TP sk 532 | chr6: 137871117-137871144 |
| TP sk 533 | chr6: 137871129-137871156 |
| TP sk 534 | chr6: 137871137-137871164 |
| TP sk 535 | chr6: 137871147-137871174 |
| TP sk 536 | chr6: 137871159-137871186 |
| TP sk 537 | chr6: 137871186-137871213 |
| TP sk 538 | chr6: 137871192-137871219 |
| TP sk 539 | chr6: 137871199-137871226 |
| TP sk 540 | chr6: 137871204-137871231 |
| TP sk 541 | chr6: 137871266-137871293 |
| TP sk 542 | chr6: 137871267-137871294 |
| TP sk 543 | chr6: 137871303-137871330 |
| TP sk 544 | chr6: 137871304-137871331 |
| TP sk 545 | chr6: 137871305-137871332 |
| TP sk 546 | chr6: 137871321-137871348 |
| TP sk 547 | chr6: 137871470-137871497 |
| TP sk 548 | chr6: 137874883-137874910 |
| TP sk 549 | chr6: 137874891-137874918 |
| TP sk 550 | chr6: 137874895-137874922 |
| TP sk 551 | chr6: 137874916-137874943 |
| TP sk 552 | chr6: 137874973-137875000 |
| TP sk 553 | chr6: 137874988-137875015 |
| TP sk 554 | chr6: 137874989-137875016 |
| TP sk 555 | chr6: 137874990-137875017 |
| TP sk 556 | chr6: 137875008-137875035 |
| TP sk 557 | chr6: 137875009-137875036 |
| TP sk 558 | chr6: 137875013-137875040 |
| TP sk 559 | chr6: 137875666-137875693 |
| TP sk 560 | chr6: 137875673-137875700 |
| TP sk 561 | chr6: 137875674-137875701 |
| TP sk 562 | chr6: 137875675-137875702 |
| TP sk 563 | chr6: 137875678-137875705 |
| TP sk 564 | chr6: 137875679-137875706 |
| TP sk 565 | chr6: 137875680-137875707 |
| TP sk 566 | chr6: 137875681-137875708 |
| TP sk 567 | chr6: 137875682-137875709 |
| TP sk 568 | chr6: 137875697-137875724 |
| TP sk 569 | chr6: 137875789-137875816 |
| TP sk 570 | chr6: 137875830-137875857 |
| TP sk 571 | chr6: 137875975-137876002 |
| TP sk 572 | chr6: 137875989-137876016 |
| TP sk 573 | chr6: 137875996-137876023 |
| TP sk 574 | chr6: 137876022-137876049 |
| TP sk 575 | chr6: 137876023-137876050 |
| TP sk 576 | chr6: 137876026-137876053 |
| TP sk 577 | chr6: 137876035-137876062 |
| TP sk 578 | chr6: 137876036-137876063 |
| TP sk 579 | chr6: 137876037-137876064 |
| TP sk 580 | chr6: 137876048-137876075 |
| TP sk 581 | chr6: 137876146-137876173 |
| TP sk 582 | chr6: 137876147-137876174 |
| TP sk 583 | chr6: 137876163-137876190 |
| TP sk 584 | chr6: 137877070-137877097 |
| TP sk 585 | chr6: 137877080-137877107 |
| TP sk 586 | chr6: 137877083-137877110 |
| TP sk 587 | chr6: 137877084-137877111 |
| TP sk 588 | chr6: 137877085-137877112 |
| TP sk 589 | chr6: 137877090-137877117 |
| TP sk 590 | chr6: 137877107-137877134 |
| TP sk 591 | chr6: 137877141-137877168 |
| TP sk 592 | chr6: 137877202-137877229 |
| TP sk 593 | chr6: 137877206-137877233 |
| TP sk 594 | chr6: 137877207-137877234 |
| TP sk 595 | chr6: 137877208-137877235 |
| TP sk 596 | chr6: 137877212-137877239 |
| TP sk 597 | chr6: 137877224-137877251 |
| TP sk 598 | chr6: 137877250-137877277 |
| TP sk 599 | chr6: 137878405-137878432 |
| TP sk 600 | chr6: 137878409-137878436 |
| TP sk 601 | chr6: 137878417-137878444 |
| TP sk 602 | chr6: 137878451-137878478 |
| TP sk 603 | chr6: 137878517-137878544 |
| TP sk 604 | chr6: 137878518-137878545 |
| TP sk 605 | chr6: 137878519-137878546 |
| TP sk 606 | chr6: 137878538-137878565 |
| TP sk 607 | chr6: 137878577-137878604 |
| TP sk 608 | chr6: 137878578-137878605 |
| TP sk 609 | chr6: 137878579-137878606 |
| TP sk 610 | chr6: 137878613-137878640 |
| TP sk 611 | chr6: 137878614-137878641 |
| TP sk 612 | chr6: 137878621-137878648 |
| TP sk 613 | chr6: 137878622-137878649 |
| TP sk 614 | chr6: 137878623-137878650 |
| TP sk 615 | chr6: 137878657-137878684 |
| TP sk 616 | chr6: 137878855-137878882 |
| TP sk 617 | chr6: 137878863-137878890 |
| TP sk 618 | chr6: 137878869-137878896 |
| TP sk 619 | chr6: 137878924-137878951 |
| TP sk 620 | chr6: 137878939-137878966 |
| TP sk 621 | chr6: 137879008-137879035 |
| TP sk 622 | chr6: 137879013-137879040 |
| TP sk 623 | chr6: 137879017-137879044 |
| TP sk 624 | chr6: 137879019-137879046 |
| TP sk 625 | chr6: 137879020-137879047 |
| TP sk 626 | chr6: 137879031-137879058 |
| TP sk 627 | chr6: 137879044-137879071 |
| TP sk 628 | chr6: 137879057-137879084 |
| TP sk 629 | chr6: 137879085-137879112 |
| TP sk 630 | chr6: 137879088-137879115 |
| TP sk 631 | chr6: 137879091-137879118 |
| TP sk 632 | chr6: 137879095-137879122 |
| TP sk 633 | chr6: 137879103-137879130 |
| TP sk 634 | chr6: 137879107-137879134 |
| TP sk 635 | chr6: 137879110-137879137 |
| TP sk 636 | chr6: 137879111-137879138 |
| TP sk 637 | chr6: 137879114-137879141 |
| TP sk 638 | chr6: 137879118-137879145 |
| TP sk 639 | chr6: 137879125-137879152 |
| TP sk 640 | chr6: 137879133-137879160 |
| TP sk 641 | chr6: 137879134-137879161 |
| TP sk 642 | chr6: 137879144-137879171 |
| TP sk 643 | chr6: 137879145-137879172 |
| TP sk 644 | chr6: 137879158-137879185 |
| TP sk 645 | chr6: 137879164-137879191 |
| TP sk 646 | chr6: 137879165-137879192 |
| TP sk 647 | chr6: 137879166-137879193 |
| TP sk 648 | chr6: 137879169-137879196 |
| TP sk 649 | chr6: 137879170-137879197 |
| TP sk 650 | chr6: 137879171-137879198 |
| TP sk 651 | chr6: 137879182-137879209 |
| TP sk 652 | chr6: 137879184-137879211 |
| TP sk 653 | chr6: 137879202-137879229 |
| TP sk 654 | chr6: 137879203-137879230 |
| TP sk 655 | chr6: 137879204-137879231 |
| TP sk 656 | chr6: 137879206-137879233 |
| TP sk 657 | chr6: 137879214-137879241 |
| TP sk 658 | chr6: 137879215-137879242 |
| TP sk 659 | chr6: 137879216-137879243 |
| TP sk 660 | chr6: 137879221-137879248 |
| TP sk 661 | chr6: 137879225-137879252 |
| TP sk 662 | chr6: 137879226-137879253 |
| TP sk 663 | chr6: 137879227-137879254 |
| TP sk 664 | chr6: 137879237-137879264 |
| TP sk 665 | chr6: 137879274-137879301 |
| TP sk 666 | chr6: 137879282-137879309 |
| TP sk 667 | chr6: 137879283-137879310 |
| TP sk 668 | chr6: 137879297-137879324 |
| TP sk 669 | chr6: 137879337-137879364 |
| TP sk 670 | chr6: 137880057-137880084 |
| TP sk 671 | chr6: 137880062-137880089 |
| TP sk 672 | chr6: 137880063-137880090 |
| TP sk 673 | chr6: 137880134-137880161 |
| TP sk 674 | chr6: 137880135-137880162 |
| TP sk 675 | chr6: 137880152-137880179 |
| TP sk 676 | chr6: 137880155-137880182 |
| TP sk 677 | chr6: 137880156-137880183 |
| TP sk 678 | chr6: 137880167-137880194 |
| TP sk 679 | chr6: 137880186-137880213 |
| TP sk 680 | chr6: 137880202-137880229 |
| TP sk 681 | chr6: 137880210-137880237 |
| TP sk 682 | chr6: 137880226-137880253 |
| TP sk 683 | chr6: 137880230-137880257 |
| TP sk 684 | chr6: 137880238-137880265 |
| TP sk 685 | chr6: 137880241-137880268 |
| TP sk 686 | chr6: 137881017-137881044 |
| TP sk 687 | chr6: 137881027-137881054 |
| TP sk 688 | chr6: 137881043-137881070 |
| TP sk 689 | chr6: 137881058-137881085 |
| TP sk 690 | chr6: 137881059-137881086 |
| TP sk 691 | chr6: 137881066-137881093 |
| TP sk 692 | chr6: 137881073-137881100 |
| TP sk 693 | chr6: 137881074-137881101 |
| TP sk 694 | chr6: 137881078-137881105 |
| TP sk 695 | chr6: 137881086-137881113 |
| TP sk 696 | chr6: 137881087-137881114 |
| TP sk 697 | chr6: 137881095-137881122 |
| TP sk 698 | chr6: 137881096-137881123 |
| TP sk 699 | chr6: 137881097-137881124 |
| TP sk 700 | chr6: 137881102-137881129 |
| TP sk 701 | chr6: 137881105-137881132 |
| TP sk 702 | chr6: 137881110-137881137 |
| TP sk 703 | chr6: 137881118-137881145 |
| TP sk 704 | chr6: 137881122-137881149 |
| TP sk 705 | chr6: 137881123-137881150 |
| TP sk 706 | chr6: 137881127-137881154 |
| TP sk 707 | chr6: 137881145-137881172 |
| TP sk 708 | chr6: 137881149-137881176 |
| TP sk 709 | chr6: 137881150-137881177 |
| TP sk 710 | chr6: 137881156-137881183 |
| TP sk 711 | chr6: 137881157-137881184 |
| TP sk 712 | chr6: 137881158-137881185 |
| TP sk 713 | chr6: 137881161-137881188 |
| TP sk 714 | chr6: 137881162-137881189 |
| TP sk 715 | chr6: 137881166-137881193 |
| TP sk 716 | chr6: 137881167-137881194 |
| TP sk 717 | chr6: 137881168-137881195 |
| TP sk 718 | chr6: 137881178-137881205 |
| TP sk 719 | chr6: 137881179-137881206 |
| TP sk 720 | chr6: 137881186-137881213 |
| TP sk 721 | chr6: 137881187-137881214 |
| TP sk 722 | chr6: 137881190-137881217 |
| TP sk 723 | chr6: 137881200-137881227 |
| TP sk 724 | chr6: 137881204-137881231 |
| TP sk 725 | chr6: 137881205-137881232 |
| TP sk 726 | chr6: 137881206-137881233 |
| TP sk 727 | chr6: 137881207-137881234 |
| TP sk 728 | chr6: 137881208-137881235 |
| TP sk 729 | chr6: 137881209-137881236 |
| TP sk 730 | chr6: 137881214-137881241 |
| TP sk 731 | chr6: 137881215-137881242 |
| TP sk 732 | chr6: 137881216-137881243 |
| TP sk 733 | chr6: 137881217-137881244 |
| TP sk 734 | chr6: 137881218-137881245 |
| TP sk 735 | chr6: 137881219-137881246 |
| TP sk 736 | chr6: 137881231-137881258 |
| TP sk 737 | chr6: 137881232-137881259 |
| TP sk 738 | chr6: 137881237-137881264 |
| TP sk 739 | chr6: 137881238-137881265 |
| TP sk 740 | chr6: 137881239-137881266 |
| TP sk 741 | chr6: 137881240-137881267 |
| TP sk 742 | chr6: 137881243-137881270 |
| TP sk 743 | chr6: 137881249-137881276 |
| TP sk 744 | chr6: 137881264-137881291 |
| TP sk 745 | chr6: 137881288-137881315 |
| TP sk 746 | chr6: 137881296-137881323 |
| TP sk 747 | chr6: 137881303-137881330 |
| TP sk 748 | chr6: 137881306-137881333 |
| TP sk 749 | chr6: 137881307-137881334 |
| TP sk 750 | chr6: 137881320-137881347 |
| TP sk 751 | chr6: 137881327-137881354 |
| TP sk 752 | chr6: 137881328-137881355 |
| TP sk 753 | chr6: 137881329-137881356 |
| TP sk 754 | chr6: 137881338-137881365 |
| TP sk 755 | chr6: 137881341-137881368 |
| TP sk 756 | chr6: 137881352-137881379 |
| TP sk 757 | chr6: 137881357-137881384 |
| TP sk 758 | chr6: 137881386-137881413 |
| TP sk 759 | chr6: 137881392-137881419 |
| TP sk 760 | chr6: 137881393-137881420 |
| TP sk 761 | chr6: 137881394-137881421 |
| TP sk 762 | chr6: 137881395-137881422 |
| TP sk 763 | chr6: 137881396-137881423 |
| TP sk 764 | chr6: 137881400-137881427 |
| TP sk 765 | chr6: 137881401-137881428 |
| TP sk 766 | chr6: 137881405-137881432 |
| TP sk 767 | chr6: 137881413-137881440 |
| TP sk 768 | chr6: 137881418-137881445 |
| TP sk 769 | chr6: 137881437-137881464 |
| TP sk 770 | chr6: 137881454-137881481 |
| TP sk 771 | chr6: 137881459-137881486 |
| TP sk 772 | chr6: 137881467-137881494 |
| TP sk 773 | chr6: 137881468-137881495 |
| TP sk 774 | chr6: 137881480-137881507 |
| TP sk 775 | chr6: 137881483-137881510 |
| TP sk 776 | chr6: 137881490-137881517 |
| TP sk 777 | chr6: 137881491-137881518 |
| TP sk 778 | chr6: 137881502-137881529 |
| TP sk 779 | chr6: 137881503-137881530 |
| TP sk 780 | chr6: 137881509-137881536 |
| TP sk 781 | chr6: 137881511-137881538 |
| TP sk 782 | chr6: 137881514-137881541 |
| TP sk 783 | chr6: 137881515-137881542 |
| TP sk 784 | chr6: 137881538-137881565 |
| TP sk 785 | chr6: 137881559-137881586 |
| TP sk 786 | chr6: 137881560-137881587 |
| TP sk 787 | chr6: 137881561-137881588 |
| TP sk 788 | chr6: 137881564-137881591 |
| TP sk 789 | chr6: 137881568-137881595 |
| TP sk 790 | chr6: 137881569-137881596 |
| TP sk 791 | chr6: 137881571-137881598 |
| TP sk 792 | chr6: 137881576-137881603 |
| TP sk 793 | chr6: 137881580-137881607 |
| TP sk 794 | chr6: 137881586-137881613 |
| TP sk 795 | chr6: 137881590-137881617 |
| TP sk 796 | chr6: 137881592-137881619 |
| TP sk 797 | chr6: 137881597-137881624 |
| TP sk 798 | chr6: 137881598-137881625 |
| TP sk 799 | chr6: 137881599-137881626 |
| TP sk 800 | chr6: 137881604-137881631 |
| TP sk 801 | chr6: 137881610-137881637 |
| TP sk 802 | chr6: 137881632-137881659 |
| TP sk 803 | chr6: 137881638-137881665 |
| TP sk 804 | chr6: 137881639-137881666 |
| TP sk 805 | chr6: 137881640-137881667 |
| TP sk 806 | chr6: 137881646-137881673 |
| TP sk 807 | chr6: 137881647-137881674 |
| TP sk 808 | chr6: 137881650-137881677 |
| TP sk 809 | chr6: 137881660-137881687 |
| TP sk 810 | chr6: 137881661-137881688 |
| TP sk 811 | chr6: 137881683-137881710 |
| TP sk 812 | chr6: 137881684-137881711 |
| TP sk 813 | chr6: 137881688-137881715 |
| TP sk 814 | chr6: 137881721-137881748 |
| TP sk 815 | chr6: 137881727-137881754 |
| TP sk 816 | chr6: 137881732-137881759 |
| TP sk 817 | chr6: 137881735-137881762 |
| TP sk 818 | chr6: 137881738-137881765 |
| TP sk 819 | chr6: 137881739-137881766 |
| TP sk 820 | chr6: 137881740-137881767 |
| TP sk 821 | chr6: 137881743-137881770 |
| TP sk 822 | chr6: 137881744-137881771 |
| TP sk 823 | chr6: 137881745-137881772 |
| TP sk 824 | chr6: 137881746-137881773 |
| TP sk 825 | chr6: 137881756-137881783 |
| TP sk 826 | chr6: 137881764-137881791 |
| TP sk 827 | chr6: 137881770-137881797 |
| TP sk 828 | chr6: 137881776-137881803 |
| TP sk 829 | chr6: 137881785-137881812 |
| TP sk 830 | chr6: 137881792-137881819 |
| TP sk 831 | chr6: 137881793-137881820 |
| TP sk 832 | chr6: 137881794-137881821 |
| TP sk 833 | chr6: 137881795-137881822 |
| TP sk 834 | chr6: 137881802-137881829 |
| TP sk 835 | chr6: 137881832-137881859 |
| TP sk 836 | chr6: 137881851-137881878 |
| TP sk 837 | chr6: 137881865-137881892 |
| TP sk 838 | chr6: 137881866-137881893 |
| TP sk 839 | chr6: 137881870-137881897 |
| TP sk 840 | chr6: 137881871-137881898 |
| TP sk 841 | chr6: 137881874-137881901 |
| TP sk 842 | chr6: 137881875-137881902 |
| TP sk 843 | chr6: 137881881-137881908 |
| TP sk 844 | chr6: 137881886-137881913 |
| TP sk 845 | chr6: 137881894-137881921 |
| TP sk 846 | chr6: 137881895-137881922 |
| TP sk 847 | chr6: 137881909-137881936 |
| TP sk 848 | chr6: 137881912-137881939 |
| TP sk 849 | chr6: 137881916-137881943 |
| TP sk 850 | chr6: 137881996-137882023 |
| TP sk 851 | chr6: 137881997-137882024 |
| TP sk 852 | chr6: 137881998-137882025 |
| TP sk 853 | chr6: 137882017-137882044 |
| TP sk 854 | chr6: 137882018-137882045 |
| TP sk 855 | chr6: 137882061-137882088 |
| TP sk 856 | chr6: 137882108-137882135 |
| TP sk 857 | chr6: 137882109-137882136 |
| TP sk 858 | chr6: 137882116-137882143 |
| TP sk 859 | chr6: 137882117-137882144 |
| TP sk 860 | chr6: 137882154-137882181 |
| TP sk 861 | chr6: 137882158-137882185 |
| TP sk 862 | chr6: 137882164-137882191 |
| TP sk 863 | chr6: 137882165-137882192 |
| TP sk 864 | chr6: 137882184-137882211 |
| TP sk 865 | chr6: 137882194-137882221 |
| TP sk 866 | chr6: 137882195-137882222 |
| TP sk 867 | chr6: 137882196-137882223 |
| TP sk 868 | chr6: 137882200-137882227 |
| TP sk 869 | chr6: 137882251-137882278 |
| TP sk 870 | chr6: 137882252-137882279 |
| TP sk 871 | chr6: 137882260-137882287 |
| TP sk 872 | chr6: 137882267-137882294 |
| TP sk 873 | chr6: 137882289-137882316 |
| TP sk 874 | chr6: 137882339-137882366 |
| TP sk 875 | chr6: 137882340-137882367 |
| TP sk 876 | chr6: 137882341-137882368 |
| TP sk 877 | chr6: 137882375-137882402 |
| TP sk 878 | chr6: 137882387-137882414 |
| TP sk 879 | chr6: 137882389-137882416 |
| TP sk 880 | chr6: 137882395-137882422 |
| TP sk 881 | chr6: 137882396-137882423 |
| TP sk 882 | chr6: 137882400-137882427 |
| TP sk 883 | chr6: 137882414-137882441 |
| TP sk 884 | chr6: 137882415-137882442 |
| TP sk 885 | chr6: 137882425-137882452 |
| TP sk 886 | chr6: 137882430-137882457 |
| TP sk 887 | chr6: 137882435-137882462 |
| TP sk 888 | chr6: 137882453-137882480 |
| TP sk 889 | chr6: 137882458-137882485 |
| TP sk 890 | chr6: 137882466-137882493 |
| TP sk 891 | chr6: 137882476-137882503 |
| TP sk 892 | chr6: 137882479-137882506 |
| TP sk 893 | chr6: 137882480-137882507 |
| TP sk 894 | chr6: 137882481-137882508 |
| TP sk 895 | chr6: 137882502-137882529 |
| TP sk 896 | chr6: 137882542-137882569 |
| TP sk 897 | chr6: 137882554-137882581 |
| TP sk 898 | chr6: 137882592-137882619 |
| TP sk 899 | chr6: 137882596-137882623 |
| TP sk 900 | chr6: 137882604-137882631 |
| TP sk 901 | chr6: 137882605-137882632 |
| TP sk 902 | chr6: 137882607-137882634 |
| TP sk 903 | chr6: 137882609-137882636 |
| TP sk 904 | chr6: 137882611-137882638 |
| TP sk 905 | chr6: 137882614-137882641 |
| TP sk 906 | chr6: 137882615-137882642 |
| TP sk 907 | chr6: 137882616-137882643 |
| TP sk 908 | chr6: 137882626-137882653 |
| TP sk 909 | chr6: 137882632-137882659 |
| TP sk 910 | chr6: 137882639-137882666 |
| TP sk 911 | chr6: 137882640-137882667 |
| TP sk 912 | chr6: 137882650-137882677 |
| TP sk 913 | chr6: 137882663-137882690 |
| TP sk 914 | chr6: 137882678-137882705 |
| TP sk 915 | chr6: 137882692-137882719 |
| TP sk 916 | chr6: 137882693-137882720 |
| TP sk 917 | chr6: 137882694-137882721 |
| TP sk 918 | chr6: 137882695-137882722 |
| TP sk 919 | chr6: 137882696-137882723 |
| TP sk 920 | chr6: 137882697-137882724 |
| TP sk 921 | chr6: 137882701-137882728 |
| TP sk 922 | chr6: 137882702-137882729 |
| TP sk 923 | chr6: 137882715-137882742 |
| TP sk 924 | chr6: 137882722-137882749 |
| TP sk 925 | chr6: 137882730-137882757 |
| TP sk 926 | chr6: 137882734-137882761 |
| TP sk 927 | chr6: 137882735-137882762 |
| TP sk 928 | chr6: 137882736-137882763 |
| TP sk 929 | chr6: 137882737-137882764 |
| TP sk 930 | chr6: 137882743-137882770 |
| TP sk 931 | chr6: 137882744-137882771 |
| TP sk 932 | chr6: 137882752-137882779 |
| TP sk 933 | chr6: 137882753-137882780 |
| TP sk 934 | chr6: 137882768-137882795 |
| TP sk 935 | chr6: 137882775-137882802 |
| TP sk 936 | chr6: 137882782-137882809 |
| TP sk 937 | chr6: 137882788-137882815 |
| TP sk 938 | chr6: 137882815-137882842 |
| TP sk 939 | chr6: 137882853-137882880 |
| TP sk 940 | chr6: 137882856-137882883 |
| TP sk 941 | chr6: 137882857-137882884 |
| TP sk 942 | chr6: 137882858-137882885 |
| TP sk 943 | chr6: 137882884-137882911 |
| TP sk 944 | chr6: 137882896-137882923 |
| TP sk 945 | chr6: 137882897-137882924 |
| TP sk 946 | chr6: 137882898-137882925 |
| TP sk 947 | chr6: 137882899-137882926 |
| TP sk 948 | chr6: 137882912-137882939 |
| TP sk 949 | chr6: 137882915-137882942 |
| TP sk 950 | chr6: 137882940-137882967 |
| TP sk 951 | chr6: 137882958-137882985 |
| TP sk 952 | chr6: 137882966-137882993 |
| TP sk 953 | chr6: 137882974-137883001 |
| TP sk 954 | chr6: 137883002-137883029 |
| TP sk 955 | chr6: 137883003-137883030 |
| TP sk 956 | chr6: 137883004-137883031 |
| TP sk 957 | chr6: 137883012-137883039 |
| TP sk 958 | chr6: 137883013-137883040 |
| TP sk 959 | chr6: 137883014-137883041 |
| TP sk 960 | chr6: 137883015-137883042 |
| TP sk 961 | chr6: 137883026-137883053 |
| TP sk 962 | chr6: 137883027-137883054 |
| TP sk 963 | chr6: 137883052-137883079 |
| TP sk 964 | chr6: 137883061-137883088 |
| TP sk 965 | chr6: 137883134-137883161 |
| TP sk 966 | chr6: 137883208-137883235 |
| TP sk 967 | chr6: 137883209-137883236 |
| TP sk 968 | chr6: 137883211-137883238 |
| TP sk 969 | chr6: 137883221-137883248 |
| TP sk 970 | chr6: 137883224-137883251 |
| TP sk 971 | chr6: 137876099-137876126 |

TABLE 3B
Human ZC3H12A genomic coordinate of the present invention

| No. | Chromosomal coordinate range |
|---|---|
| ZC sk 1 | chr1: 37473087-37473114 |
| ZC sk 2 | chr1: 37473088-37473115 |
| ZC sk 3 | chr1: 37473101-37473128 |
| ZC sk 4 | chr1: 37473104-37473131 |
| ZC sk 5 | chr1: 37473105-37473132 |
| ZC sk 6 | chr1: 37473106-37473133 |
| ZC sk 7 | chr1: 37473154-37473181 |
| ZC sk 8 | chr1: 37473170-37473197 |
| ZC sk 9 | chr1: 37473176-37473203 |
| ZC sk 10 | chr1: 37473177-37473204 |
| ZC sk 11 | chr1: 37473181-37473208 |
| ZC sk 12 | chr1: 37473184-37473211 |
| ZC sk 13 | chr1: 37473193-37473220 |
| ZC sk 14 | chr1: 37473194-37473221 |
| ZC sk 15 | chr1: 37473195-37473222 |
| ZC sk 16 | chr1: 37473196-37473223 |
| ZC sk 17 | chr1: 37473206-37473233 |
| ZC sk 18 | chr1: 37473207-37473234 |
| ZC sk 19 | chr1: 37473215-37473242 |
| ZC sk 20 | chr1: 37473221-37473248 |
| ZC sk 21 | chr1: 37473226-37473253 |
| ZC sk 22 | chr1: 37473227-37473254 |
| ZC sk 23 | chr1: 37473235-37473262 |
| ZC sk 24 | chr1: 37473245-37473272 |
| ZC sk 25 | chr1: 37473251-37473278 |
| ZC sk 26 | chr1: 37473259-37473286 |
| ZC sk 27 | chr1: 37473314-37473341 |
| ZC sk 28 | chr1: 37473362-37473389 |
| ZC sk 29 | chr1: 37473381-37473408 |
| ZC sk 30 | chr1: 37473397-37473424 |
| ZC sk 31 | chr1: 37473401-37473428 |
| ZC sk 32 | chr1: 37473406-37473433 |
| ZC sk 33 | chr1: 37473423-37473450 |
| ZC sk 34 | chr1: 37473426-37473453 |
| ZC sk 35 | chr1: 37473433-37473460 |
| ZC sk 36 | chr1: 37473453-37473480 |
| ZC sk 37 | chr1: 37473454-37473481 |
| ZC sk 38 | chr1: 37473467-37473494 |
| ZC sk 39 | chr1: 37473470-37473497 |
| ZC sk 40 | chr1: 37473519-37473546 |
| ZC sk 41 | chr1: 37473527-37473554 |
| ZC sk 42 | chr1: 37473550-37473577 |
| ZC sk 43 | chr1: 37473554-37473581 |
| ZC sk 44 | chr1: 37473557-37473584 |
| ZC sk 45 | chr1: 37473558-37473585 |
| ZC sk 46 | chr1: 37473559-37473586 |
| ZC sk 47 | chr1: 37473565-37473592 |
| ZC sk 48 | chr1: 37473566-37473593 |
| ZC sk 49 | chr1: 37473567-37473594 |
| ZC sk 50 | chr1: 37473578-37473605 |
| ZC sk 51 | chr1: 37473592-37473619 |
| ZC sk 52 | chr1: 37473607-37473634 |
| ZC sk 53 | chr1: 37473626-37473653 |
| ZC sk 54 | chr1: 37473627-37473654 |
| ZC sk 55 | chr1: 37473628-37473655 |
| ZC sk 56 | chr1: 37473630-37473657 |
| ZC sk 57 | chr1: 37473646-37473673 |
| ZC sk 58 | chr1: 37473657-37473684 |
| ZC sk 59 | chr1: 37473658-37473685 |
| ZC sk 60 | chr1: 37473664-37473691 |
| ZC sk 61 | chr1: 37473703-37473730 |
| ZC sk 62 | chr1: 37473717-37473744 |
| ZC sk 63 | chr1: 37473718-37473745 |
| ZC sk 64 | chr1: 37473730-37473757 |
| ZC sk 65 | chr1: 37473731-37473758 |
| ZC sk 66 | chr1: 37473737-37473764 |
| ZC sk 67 | chr1: 37473747-37473774 |
| ZC sk 68 | chr1: 37473748-37473775 |
| ZC sk 69 | chr1: 37473769-37473796 |
| ZC sk 70 | chr1: 37473770-37473797 |
| ZC sk 71 | chr1: 37473776-37473803 |
| ZC sk 72 | chr1: 37473777-37473804 |
| ZC sk 73 | chr1: 37473791-37473818 |
| ZC sk 74 | chr1: 37473792-37473819 |
| ZC sk 75 | chr1: 37473793-37473820 |
| ZC sk 76 | chr1: 37473794-37473821 |
| ZC sk 77 | chr1: 37473809-37473836 |
| ZC sk 78 | chr1: 37473812-37473839 |
| ZC sk 79 | chr1: 37473813-37473840 |
| ZC sk 80 | chr1: 37473818-37473845 |
| ZC sk 81 | chr1: 37473819-37473846 |
| ZC sk 82 | chr1: 37473838-37473865 |
| ZC sk 83 | chr1: 37473853-37473880 |
| ZC sk 84 | chr1: 37473860-37473887 |
| ZC sk 85 | chr1: 37473861-37473888 |
| ZC sk 86 | chr1: 37473862-37473889 |
| ZC sk 87 | chr1: 37473869-37473896 |
| ZC sk 88 | chr1: 37473884-37473911 |
| ZC sk 89 | chr1: 37473897-37473924 |
| ZC sk 90 | chr1: 37473898-37473925 |
| ZC sk 91 | chr1: 37473907-37473934 |
| ZC sk 92 | chr1: 37473919-37473946 |
| ZC sk 93 | chr1: 37473932-37473959 |
| ZC sk 94 | chr1: 37473948-37473975 |
| ZC sk 95 | chr1: 37473952-37473979 |
| ZC sk 96 | chr1: 37473956-37473983 |
| ZC sk 97 | chr1: 37473961-37473988 |
| ZC sk 98 | chr1: 37473970-37473997 |
| ZC sk 99 | chr1: 37473976-37474003 |
| ZC sk 100 | chr1: 37473977-37474004 |
| ZC sk 101 | chr1: 37473978-37474005 |
| ZC sk 102 | chr1: 37473979-37474006 |
| ZC sk 103 | chr1: 37473982-37474009 |
| ZC sk 104 | chr1: 37473993-37474020 |
| ZC sk 105 | chr1: 37473998-37474025 |
| ZC sk 106 | chr1: 37473999-37474026 |
| ZC sk 107 | chr1: 37474000-37474027 |
| ZC sk 108 | chr1: 37474010-37474037 |
| ZC sk 109 | chr1: 37474014-37474041 |
| ZC sk 110 | chr1: 37474024-37474051 |
| ZC sk 111 | chr1: 37474025-37474052 |
| ZC sk 112 | chr1: 37474026-37474053 |
| ZC sk 113 | chr1: 37474027-37474054 |
| ZC sk 114 | chr1: 37474055-37474082 |
| ZC sk 115 | chr1: 37474057-37474084 |
| ZC sk 116 | chr1: 37474062-37474089 |
| ZC sk 117 | chr1: 37474076-37474103 |
| ZC sk 118 | chr1: 37474079-37474106 |
| ZC sk 119 | chr1: 37474090-37474117 |
| ZC sk 120 | chr1: 37474093-37474120 |
| ZC sk 121 | chr1: 37474100-37474127 |
| ZC sk 122 | chr1: 37474101-37474128 |
| ZC sk 123 | chr1: 37474108-37474135 |
| ZC sk 124 | chr1: 37474112-37474139 |
| ZC sk 125 | chr1: 37474115-37474142 |
| ZC sk 126 | chr1: 37474129-37474156 |
| ZC sk 127 | chr1: 37474133-37474160 |
| ZC sk 128 | chr1: 37474136-37474163 |
| ZC sk 129 | chr1: 37474140-37474167 |
| ZC sk 130 | chr1: 37474143-37474170 |
| ZC sk 131 | chr1: 37474160-37474187 |
| ZC sk 132 | chr1: 37474163-37474190 |
| ZC sk 133 | chr1: 37474164-37474191 |
| ZC sk 134 | chr1: 37474165-37474192 |
| ZC sk 135 | chr1: 37474168-37474195 |
| ZC sk 136 | chr1: 37474186-37474213 |
| ZC sk 137 | chr1: 37474197-37474224 |
| ZC sk 138 | chr1: 37474201-37474228 |
| ZC sk 139 | chr1: 37474215-37474242 |
| ZC sk 140 | chr1: 37474216-37474243 |
| ZC sk 141 | chr1: 37474234-37474261 |
| ZC sk 142 | chr1: 37474236-37474263 |
| ZC sk 143 | chr1: 37474239-37474266 |
| ZC sk 144 | chr1: 37474246-37474273 |
| ZC sk 145 | chr1: 37474249-37474276 |
| ZC sk 146 | chr1: 37474251-37474278 |
| ZC sk 147 | chr1: 37474253-37474280 |
| ZC sk 148 | chr1: 37474255-37474282 |
| ZC sk 149 | chr1: 37474258-37474285 |
| ZC sk 150 | chr1: 37474273-37474300 |
| ZC sk 151 | chr1: 37474274-37474301 |
| ZC sk 152 | chr1: 37474275-37474302 |
| ZC sk 153 | chr1: 37474291-37474318 |
| ZC sk 154 | chr1: 37474297-37474324 |
| ZC sk 155 | chr1: 37474298-37474325 |
| ZC sk 156 | chr1: 37474302-37474329 |
| ZC sk 157 | chr1: 37474318-37474345 |
| ZC sk 158 | chr1: 37474326-37474353 |
| ZC sk 159 | chr1: 37474337-37474364 |
| ZC sk 160 | chr1: 37474338-37474365 |
| ZC sk 161 | chr1: 37474344-37474371 |
| ZC sk 162 | chr1: 37474355-37474382 |
| ZC sk 163 | chr1: 37474358-37474385 |
| ZC sk 164 | chr1: 37474361-37474388 |
| ZC sk 165 | chr1: 37474362-37474389 |
| ZC sk 166 | chr1: 37474364-37474391 |
| ZC sk 167 | chr1: 37474372-37474399 |
| ZC sk 168 | chr1: 37474374-37474401 |
| ZC sk 169 | chr1: 37474378-37474405 |
| ZC sk 170 | chr1: 37474379-37474406 |
| ZC sk 171 | chr1: 37474380-37474407 |
| ZC sk 172 | chr1: 37474381-37474408 |
| ZC sk 173 | chr1: 37474382-37474409 |
| ZC sk 174 | chr1: 37474388-37474415 |
| ZC sk 175 | chr1: 37474389-37474416 |
| ZC sk 176 | chr1: 37474390-37474417 |
| ZC sk 177 | chr1: 37474391-37474418 |
| ZC sk 178 | chr1: 37474392-37474419 |
| ZC sk 179 | chr1: 37474394-37474421 |
| ZC sk 180 | chr1: 37474395-37474422 |
| ZC sk 181 | chr1: 37474396-37474423 |
| ZC sk 182 | chr1: 37474409-37474436 |
| ZC sk 183 | chr1: 37474410-37474437 |
| ZC sk 184 | chr1: 37474414-37474441 |
| ZC sk 185 | chr1: 37474420-37474447 |
| ZC sk 186 | chr1: 37474424-37474451 |
| ZC sk 187 | chr1: 37474425-37474452 |
| ZC sk 188 | chr1: 37474426-37474453 |
| ZC sk 189 | chr1: 37474431-37474458 |
| ZC sk 190 | chr1: 37474446-37474473 |
| ZC sk 191 | chr1: 37474447-37474474 |
| ZC sk 192 | chr1: 37474448-37474475 |
| ZC sk 193 | chr1: 37474451-37474478 |
| ZC sk 194 | chr1: 37474459-37474486 |
| ZC sk 195 | chr1: 37474460-37474487 |
| ZC sk 196 | chr1: 37474462-37474489 |
| ZC sk 197 | chr1: 37474463-37474490 |
| ZC sk 198 | chr1: 37474464-37474491 |
| ZC sk 199 | chr1: 37474467-37474494 |
| ZC sk 200 | chr1: 37474468-37474495 |
| ZC sk 201 | chr1: 37474469-37474496 |
| ZC sk 202 | chr1: 37474470-37474497 |
| ZC sk 203 | chr1: 37474482-37474509 |
| ZC sk 204 | chr1: 37474483-37474510 |
| ZC sk 205 | chr1: 37474492-37474519 |
| ZC sk 206 | chr1: 37474493-37474520 |
| ZC sk 207 | chr1: 37474494-37474521 |
| ZC sk 208 | chr1: 37474497-37474524 |
| ZC sk 209 | chr1: 37474498-37474525 |
| ZC sk 210 | chr1: 37474499-37474526 |
| ZC sk 211 | chr1: 37474504-37474531 |
| ZC sk 212 | chr1: 37474505-37474532 |
| ZC sk 213 | chr1: 37474511-37474538 |
| ZC sk 214 | chr1: 37474522-37474549 |
| ZC sk 215 | chr1: 37474527-37474554 |
| ZC sk 216 | chr1: 37474530-37474557 |
| ZC sk 217 | chr1: 37474533-37474560 |
| ZC sk 218 | chr1: 37474537-37474564 |
| ZC sk 219 | chr1: 37474538-37474565 |
| ZC sk 220 | chr1: 37474545-37474572 |
| ZC sk 221 | chr1: 37474548-37474575 |
| ZC sk 222 | chr1: 37474549-37474576 |
| ZC sk 223 | chr1: 37474550-37474577 |
| ZC sk 224 | chr1: 37474555-37474582 |
| ZC sk 225 | chr1: 37474561-37474588 |
| ZC sk 226 | chr1: 37474563-37474590 |
| ZC sk 227 | chr1: 37474566-37474593 |
| ZC sk 228 | chr1: 37474569-37474596 |
| ZC sk 229 | chr1: 37474570-37474597 |
| ZC sk 230 | chr1: 37474575-37474602 |
| ZC sk 231 | chr1: 37474576-37474603 |
| ZC sk 232 | chr1: 37474577-37474604 |
| ZC sk 233 | chr1: 37474578-37474605 |
| ZC sk 234 | chr1: 37474581-37474608 |
| ZC sk 235 | chr1: 37474589-37474616 |
| ZC sk 236 | chr1: 37474590-37474617 |
| ZC sk 237 | chr1: 37474591-37474618 |
| ZC sk 238 | chr1: 37474598-37474625 |
| ZC sk 239 | chr1: 37474601-37474628 |
| ZC sk 240 | chr1: 37474602-37474629 |
| ZC sk 241 | chr1: 37474603-37474630 |
| ZC sk 242 | chr1: 37474605-37474632 |
| ZC sk 243 | chr1: 37474608-37474635 |
| ZC sk 244 | chr1: 37474609-37474636 |
| ZC sk 245 | chr1: 37474612-37474639 |
| ZC sk 246 | chr1: 37474613-37474640 |
| ZC sk 247 | chr1: 37474616-37474643 |
| ZC sk 248 | chr1: 37474617-37474644 |
| ZC sk 249 | chr1: 37474618-37474645 |
| ZC sk 250 | chr1: 37474621-37474648 |
| ZC sk 251 | chr1: 37474622-37474649 |
| ZC sk 252 | chr1: 37474627-37474654 |
| ZC sk 253 | chr1: 37474628-37474655 |
| ZC sk 254 | chr1: 37475432-37475459 |
| ZC sk 255 | chr1: 37475435-37475462 |
| ZC sk 256 | chr1: 37475436-37475463 |
| ZC sk 257 | chr1: 37475437-37475464 |
| ZC sk 258 | chr1: 37475442-37475469 |
| ZC sk 259 | chr1: 37475443-37475470 |
| ZC sk 260 | chr1: 37475448-37475475 |
| ZC sk 261 | chr1: 37475449-37475476 |
| ZC sk 262 | chr1: 37475450-37475477 |
| ZC sk 263 | chr1: 37479130-37479157 |
| ZC sk 264 | chr1: 37479134-37479161 |
| ZC sk 265 | chr1: 37479135-37479162 |
| ZC sk 266 | chr1: 37479136-37479163 |
| ZC sk 267 | chr1: 37479137-37479164 |
| ZC sk 268 | chr1: 37479150-37479177 |
| ZC sk 269 | chr1: 37479151-37479178 |
| ZC sk 270 | chr1: 37479152-37479179 |
| ZC sk 271 | chr1: 37479159-37479186 |
| ZC sk 272 | chr1: 37479166-37479193 |
| ZC sk 273 | chr1: 37479188-37479215 |
| ZC sk 274 | chr1: 37479196-37479223 |
| ZC sk 275 | chr1: 37479197-37479224 |
| ZC sk 276 | chr1: 37479201-37479228 |
| ZC sk 277 | chr1: 37479209-37479236 |
| ZC sk 278 | chr1: 37479219-37479246 |
| ZC sk 279 | chr1: 37479227-37479254 |
| ZC sk 280 | chr1: 37479228-37479255 |
| ZC sk 281 | chr1: 37479229-37479256 |
| ZC sk 282 | chr1: 37479234-37479261 |
| ZC sk 283 | chr1: 37479235-37479262 |
| ZC sk 284 | chr1: 37479236-37479263 |
| ZC sk 285 | chr1: 37479240-37479267 |
| ZC sk 286 | chr1: 37479241-37479268 |
| ZC sk 287 | chr1: 37479242-37479269 |
| ZC sk 288 | chr1: 37479243-37479270 |
| ZC sk 289 | chr1: 37479244-37479271 |
| ZC sk 290 | chr1: 37479248-37479275 |
| ZC sk 291 | chr1: 37479249-37479276 |
| ZC sk 292 | chr1: 37479257-37479284 |
| ZC sk 293 | chr1: 37479258-37479285 |
| ZC sk 294 | chr1: 37479260-37479287 |
| ZC sk 295 | chr1: 37479268-37479295 |
| ZC sk 296 | chr1: 37479270-37479297 |
| ZC sk 297 | chr1: 37479271-37479298 |
| ZC sk 298 | chr1: 37479272-37479299 |
| ZC sk 299 | chr1: 37479283-37479310 |
| ZC sk 300 | chr1: 37479286-37479313 |
| ZC sk 301 | chr1: 37479296-37479323 |
| ZC sk 302 | chr1: 37479303-37479330 |
| ZC sk 303 | chr1: 37479306-37479333 |
| ZC sk 304 | chr1: 37479315-37479342 |
| ZC sk 305 | chr1: 37479319-37479346 |
| ZC sk 306 | chr1: 37479320-37479347 |
| ZC sk 307 | chr1: 37479331-37479358 |
| ZC sk 308 | chr1: 37479332-37479359 |
| ZC sk 309 | chr1: 37479333-37479360 |
| ZC sk 310 | chr1: 37479351-37479378 |
| ZC sk 311 | chr1: 37479356-37479383 |
| ZC sk 312 | chr1: 37479361-37479388 |
| ZC sk 313 | chr1: 37479362-37479389 |
| ZC sk 314 | chr1: 37479366-37479393 |
| ZC sk 315 | chr1: 37479375-37479402 |
| ZC sk 316 | chr1: 37479387-37479414 |
| ZC sk 317 | chr1: 37479397-37479424 |
| ZC sk 318 | chr1: 37479398-37479425 |
| ZC sk 319 | chr1: 37479399-37479426 |
| ZC sk 320 | chr1: 37479405-37479432 |
| ZC sk 321 | chr1: 37479406-37479433 |
| ZC sk 322 | chr1: 37479410-37479437 |
| ZC sk 323 | chr1: 37479414-37479441 |
| ZC sk 324 | chr1: 37479415-37479442 |
| ZC sk 325 | chr1: 37479418-37479445 |
| ZC sk 326 | chr1: 37479419-37479446 |
| ZC sk 327 | chr1: 37479420-37479447 |
| ZC sk 328 | chr1: 37479425-37479452 |
| ZC sk 329 | chr1: 37479432-37479459 |
| ZC sk 330 | chr1: 37479435-37479462 |
| ZC sk 331 | chr1: 37479443-37479470 |
| ZC sk 332 | chr1: 37479447-37479474 |
| ZC sk 333 | chr1: 37479448-37479475 |
| ZC sk 334 | chr1: 37479453-37479480 |
| ZC sk 335 | chr1: 37479465-37479492 |
| ZC sk 336 | chr1: 37479476-37479503 |
| ZC sk 337 | chr1: 37479477-37479504 |
| ZC sk 338 | chr1: 37479482-37479509 |
| ZC sk 339 | chr1: 37479496-37479523 |
| ZC sk 340 | chr1: 37479502-37479529 |
| ZC sk 341 | chr1: 37479509-37479536 |
| ZC sk 342 | chr1: 37479510-37479537 |
| ZC sk 343 | chr1: 37479511-37479538 |
| ZC sk 344 | chr1: 37479516-37479543 |
| ZC sk 345 | chr1: 37479517-37479544 |
| ZC sk 346 | chr1: 37479518-37479545 |
| ZC sk 347 | chr1: 37479522-37479549 |
| ZC sk 348 | chr1: 37479526-37479553 |
| ZC sk 349 | chr1: 37479533-37479560 |
| ZC sk 350 | chr1: 37479534-37479561 |
| ZC sk 351 | chr1: 37479535-37479562 |
| ZC sk 352 | chr1: 37479536-37479563 |
| ZC sk 353 | chr1: 37479538-37479565 |
| ZC sk 354 | chr1: 37479550-37479577 |
| ZC sk 355 | chr1: 37479551-37479578 |
| ZC sk 356 | chr1: 37479554-37479581 |
| ZC sk 357 | chr1: 37479569-37479596 |
| ZC sk 358 | chr1: 37479588-37479615 |
| ZC sk 359 | chr1: 37479593-37479620 |
| ZC sk 360 | chr1: 37479595-37479622 |
| ZC sk 361 | chr1: 37479596-37479623 |
| ZC sk 362 | chr1: 37479597-37479624 |
| ZC sk 363 | chr1: 37479614-37479641 |
| ZC sk 364 | chr1: 37479618-37479645 |
| ZC sk 365 | chr1: 37479637-37479664 |
| ZC sk 366 | chr1: 37479638-37479665 |
| ZC sk 367 | chr1: 37479641-37479668 |
| ZC sk 368 | chr1: 37479652-37479679 |
| ZC sk 369 | chr1: 37479653-37479680 |
| ZC sk 370 | chr1: 37479674-37479701 |
| ZC sk 371 | chr1: 37479675-37479702 |
| ZC sk 372 | chr1: 37479678-37479705 |
| ZC sk 373 | chr1: 37479679-37479706 |
| ZC sk 374 | chr1: 37479680-37479707 |
| ZC sk 375 | chr1: 37479684-37479711 |
| ZC sk 376 | chr1: 37479685-37479712 |
| ZC sk 377 | chr1: 37479686-37479713 |
| ZC sk 378 | chr1: 37479690-37479717 |
| ZC sk 379 | chr1: 37479692-37479719 |
| ZC sk 380 | chr1: 37479701-37479728 |
| ZC sk 381 | chr1: 37479703-37479730 |
| ZC sk 382 | chr1: 37479704-37479731 |
| ZC sk 383 | chr1: 37479705-37479732 |
| ZC sk 384 | chr1: 37479710-37479737 |
| ZC sk 385 | chr1: 37479711-37479738 |
| ZC sk 386 | chr1: 37479718-37479745 |
| ZC sk 387 | chr1: 37479728-37479755 |
| ZC sk 388 | chr1: 37479739-37479766 |
| ZC sk 389 | chr1: 37479742-37479769 |
| ZC sk 390 | chr1: 37479752-37479779 |
| ZC sk 391 | chr1: 37479761-37479788 |
| ZC sk 392 | chr1: 37479771-37479798 |
| ZC sk 393 | chr1: 37479772-37479799 |
| ZC sk 394 | chr1: 37479776-37479803 |
| ZC sk 395 | chr1: 37479785-37479812 |
| ZC sk 396 | chr1: 37479786-37479813 |
| ZC sk 397 | chr1: 37479787-37479814 |
| ZC sk 398 | chr1: 37479788-37479815 |
| ZC sk 399 | chr1: 37479790-37479817 |
| ZC sk 400 | chr1: 37479791-37479818 |
| ZC sk 401 | chr1: 37479792-37479819 |
| ZC sk 402 | chr1: 37479793-37479820 |
| ZC sk 403 | chr1: 37479794-37479821 |
| ZC sk 404 | chr1: 37479795-37479822 |
| ZC sk 405 | chr1: 37479796-37479823 |
| ZC sk 406 | chr1: 37479797-37479824 |
| ZC sk 407 | chr1: 37479798-37479825 |
| ZC sk 408 | chr1: 37479799-37479826 |
| ZC sk 409 | chr1: 37479834-37479861 |
| ZC sk 410 | chr1: 37479840-37479867 |
| ZC sk 411 | chr1: 37479851-37479878 |
| ZC sk 412 | chr1: 37479852-37479879 |
| ZC sk 413 | chr1: 37479854-37479881 |
| ZC sk 414 | chr1: 37479855-37479882 |
| ZC sk 415 | chr1: 37479856-37479883 |
| ZC sk 416 | chr1: 37479857-37479884 |
| ZC sk 417 | chr1: 37479861-37479888 |
| ZC sk 418 | chr1: 37479863-37479890 |
| ZC sk 419 | chr1: 37479864-37479891 |
| ZC sk 420 | chr1: 37479875-37479902 |
| ZC sk 421 | chr1: 37479878-37479905 |
| ZC sk 422 | chr1: 37479891-37479918 |
| ZC sk 423 | chr1: 37479899-37479926 |
| ZC sk 424 | chr1: 37479908-37479935 |
| ZC sk 425 | chr1: 37479913-37479940 |
| ZC sk 426 | chr1: 37479914-37479941 |
| ZC sk 427 | chr1: 37479915-37479942 |
| ZC sk 428 | chr1: 37479916-37479943 |
| ZC sk 429 | chr1: 37479918-37479945 |
| ZC sk 430 | chr1: 37479919-37479946 |
| ZC sk 431 | chr1: 37479920-37479947 |
| ZC sk 432 | chr1: 37479921-37479948 |
| ZC sk 433 | chr1: 37479922-37479949 |
| ZC sk 434 | chr1: 37480425-37480452 |
| ZC sk 435 | chr1: 37480426-37480453 |
| ZC sk 436 | chr1: 37483626-37483653 |
| ZC sk 437 | chr1: 37483627-37483654 |
| ZC sk 438 | chr1: 37483635-37483662 |
| ZC sk 439 | chr1: 37483638-37483665 |
| ZC sk 440 | chr1: 37483639-37483666 |
| ZC sk 441 | chr1: 37483640-37483667 |
| ZC sk 442 | chr1: 37483641-37483668 |
| ZC sk 443 | chr1: 37483645-37483672 |
| ZC sk 444 | chr1: 37483646-37483673 |
| ZC sk 445 | chr1: 37483647-37483674 |
| ZC sk 446 | chr1: 37483648-37483675 |
| ZC sk 447 | chr1: 37483655-37483682 |
| ZC sk 448 | chr1: 37483675-37483702 |
| ZC sk 449 | chr1: 37483677-37483704 |
| ZC sk 450 | chr1: 37483686-37483713 |
| ZC sk 451 | chr1: 37483687-37483714 |
| ZC sk 452 | chr1: 37483690-37483717 |
| ZC sk 453 | chr1: 37483692-37483719 |
| ZC sk 454 | chr1: 37483693-37483720 |
| ZC sk 455 | chr1: 37483694-37483721 |
| ZC sk 456 | chr1: 37483697-37483724 |
| ZC sk 457 | chr1: 37483698-37483725 |
| ZC sk 458 | chr1: 37483701-37483728 |
| ZC sk 459 | chr1: 37483702-37483729 |
| ZC sk 460 | chr1: 37483705-37483732 |
| ZC sk 461 | chr1: 37483706-37483733 |
| ZC sk 462 | chr1: 37483709-37483736 |
| ZC sk 463 | chr1: 37483710-37483737 |
| ZC sk 464 | chr1: 37483711-37483738 |
| ZC sk 465 | chr1: 37483716-37483743 |
| ZC sk 466 | chr1: 37483717-37483744 |
| ZC sk 467 | chr1: 37483721-37483748 |
| ZC sk 468 | chr1: 37483748-37483775 |
| ZC sk 469 | chr1: 37483752-37483779 |
| ZC sk 470 | chr1: 37483753-37483780 |
| ZC sk 471 | chr1: 37483759-37483786 |
| ZC sk 472 | chr1: 37483760-37483787 |
| ZC sk 473 | chr1: 37483787-37483814 |
| ZC sk 474 | chr1: 37483788-37483815 |
| ZC sk 475 | chr1: 37483793-37483820 |
| ZC sk 476 | chr1: 37483794-37483821 |
| ZC sk 477 | chr1: 37483798-37483825 |
| ZC sk 478 | chr1: 37483812-37483839 |
| ZC sk 479 | chr1: 37483835-37483862 |
| ZC sk 480 | chr1: 37483836-37483863 |
| ZC sk 481 | chr1: 37483843-37483870 |
| ZC sk 482 | chr1: 37483855-37483882 |
| ZC sk 483 | chr1: 37483861-37483888 |
| ZC sk 484 | chr1: 37483867-37483894 |
| ZC sk 485 | chr1: 37483874-37483901 |
| ZC sk 486 | chr1: 37483879-37483906 |
| ZC sk 487 | chr1: 37483880-37483907 |
| ZC sk 488 | chr1: 37483896-37483923 |
| ZC sk 489 | chr1: 37483905-37483932 |
| ZC sk 490 | chr1: 37483906-37483933 |
| ZC sk 491 | chr1: 37483908-37483935 |
| ZC sk 492 | chr1: 37483909-37483936 |
| ZC sk 493 | chr1: 37483910-37483937 |
| ZC sk 494 | chr1: 37483911-37483938 |
| ZC sk 495 | chr1: 37483914-37483941 |
| ZC sk 496 | chr1: 37483915-37483942 |
| ZC sk 497 | chr1: 37483918-37483945 |
| ZC sk 498 | chr1: 37483921-37483948 |
| ZC sk 499 | chr1: 37483922-37483949 |
| ZC sk 500 | chr1: 37483923-37483950 |
| ZC sk 501 | chr1: 37483924-37483951 |
| ZC sk 502 | chr1: 37483933-37483960 |
| ZC sk 503 | chr1: 37483938-37483965 |
| ZC sk 504 | chr1: 37483939-37483966 |
| ZC sk 505 | chr1: 37483943-37483970 |
| ZC sk 506 | chr1: 37483944-37483971 |
| ZC sk 507 | chr1: 37483961-37483988 |
| ZC sk 508 | chr1: 37483974-37484001 |
| ZC sk 509 | chr1: 37483975-37484002 |
| ZC sk 510 | chr1: 37483983-37484010 |
| ZC sk 511 | chr1: 37483984-37484011 |
| ZC sk 512 | chr1: 37483985-37484012 |
| ZC sk 513 | chr1: 37483988-37484015 |
| ZC sk 514 | chr1: 37483989-37484016 |
| ZC sk 515 | chr1: 37483990-37484017 |
| ZC sk 516 | chr1: 37483991-37484018 |
| ZC sk 517 | chr1: 37483996-37484023 |
| ZC sk 518 | chr1: 37483997-37484024 |
| ZC sk 519 | chr1: 37483999-37484026 |
| ZC sk 520 | chr1: 37484000-37484027 |
| ZC sk 521 | chr1: 37484001-37484028 |
| ZC sk 522 | chr1: 37484004-37484031 |
| ZC sk 523 | chr1: 37484005-37484032 |
| ZC sk 524 | chr1: 37484006-37484033 |
| ZC sk 525 | chr1: 37484009-37484036 |
| ZC sk 526 | chr1: 37484010-37484037 |
| ZC sk 527 | chr1: 37484019-37484046 |
| ZC sk 528 | chr1: 37484033-37484060 |
| ZC sk 529 | chr1: 37484034-37484061 |
| ZC sk 530 | chr1: 37484040-37484067 |
| ZC sk 531 | chr1: 37484047-37484074 |
| ZC sk 532 | chr1: 37484051-37484078 |
| ZC sk 533 | chr1: 37484052-37484079 |
| ZC sk 534 | chr1: 37484054-37484081 |
| ZC sk 535 | chr1: 37484055-37484082 |
| ZC sk 536 | chr1: 37484062-37484089 |
| ZC sk 537 | chr1: 37484065-37484092 |
| ZC sk 538 | chr1: 37484073-37484100 |
| ZC sk 539 | chr1: 37484075-37484102 |
| ZC sk 540 | chr1: 37484076-37484103 |
| ZC sk 541 | chr1: 37484082-37484109 |
| ZC sk 542 | chr1: 37484083-37484110 |
| ZC sk 543 | chr1: 37484144-37484171 |
| ZC sk 544 | chr1: 37484145-37484172 |
| ZC sk 545 | chr1: 37484148-37484175 |
| ZC sk 546 | chr1: 37484155-37484182 |
| ZC sk 547 | chr1: 37484156-37484183 |
| ZC sk 548 | chr1: 37484157-37484184 |
| ZC sk 549 | chr1: 37484162-37484189 |
| ZC sk 550 | chr1: 37484163-37484190 |
| ZC sk 551 | chr1: 37484164-37484191 |
| ZC sk 552 | chr1: 37484167-37484194 |
| ZC sk 553 | chr1: 37484170-37484197 |
| ZC sk 554 | chr1: 37484171-37484198 |
| ZC sk 555 | chr1: 37484173-37484200 |
| ZC sk 556 | chr1: 37484180-37484207 |
| ZC sk 557 | chr1: 37484181-37484208 |
| ZC sk 558 | chr1: 37484182-37484209 |
| ZC sk 559 | chr1: 37484199-37484226 |
| ZC sk 560 | chr1: 37484200-37484227 |
| ZC sk 561 | chr1: 37484203-37484230 |
| ZC sk 562 | chr1: 37484212-37484239 |
| ZC sk 563 | chr1: 37484213-37484240 |
| ZC sk 564 | chr1: 37484224-37484251 |
| ZC sk 565 | chr1: 37484227-37484254 |
| ZC sk 566 | chr1: 37484231-37484258 |
| ZC sk 567 | chr1: 37484237-37484264 |
| ZC sk 568 | chr1: 37484238-37484265 |
| ZC sk 569 | chr1: 37484241-37484268 |
| ZC sk 570 | chr1: 37484242-37484269 |
| ZC sk 571 | chr1: 37484243-37484270 |
| ZC sk 572 | chr1: 37484244-37484271 |
| ZC sk 573 | chr1: 37484252-37484279 |
| ZC sk 574 | chr1: 37484253-37484280 |
| ZC sk 575 | chr1: 37484257-37484284 |
| ZC sk 576 | chr1: 37484258-37484285 |
| ZC sk 577 | chr1: 37484259-37484286 |
| ZC sk 578 | chr1: 37484274-37484301 |
| ZC sk 579 | chr1: 37484326-37484353 |
| ZC sk 580 | chr1: 37484331-37484358 |
| ZC sk 581 | chr1: 37484334-37484361 |
| ZC sk 582 | chr1: 37484369-37484396 |
| ZC sk 583 | chr1: 37484370-37484397 |

TABLE 3C
Human SOCS1 genomic coordinate of the present invention

| No. | Chromosomal coordinate range |
|---|---|
| SC sk 1 | chr16: 11257672-11257699 |
| SC sk 2 | chr16: 11257669-11257696 |
| SC sk 3 | chr16: 11257650-11257677 |
| SC sk 4 | chr16: 11257641-11257668 |
| SC sk 5 | chr16: 11257636-11257663 |
| SC sk 6 | chr16: 11257629-11257656 |
| SC sk 7 | chr16: 11257626-11257653 |
| SC sk 8 | chr16: 11257624-11257651 |
| SC sk 9 | chr16: 11257623-11257650 |
| SC sk 10 | chr16: 11257623-11257650 |
| SC sk 11 | chr16: 11257619-11257646 |
| SC sk 12 | chr16: 11257618-11257645 |
| SC sk 13 | chr16: 11257614-11257641 |
| SC sk 14 | chr16: 11257613-11257640 |
| SC sk 15 | chr16: 11257613-11257640 |
| SC sk 16 | chr16: 11257612-11257639 |
| SC sk 17 | chr16: 11257601-11257628 |
| SC sk 18 | chr16: 11257600-11257627 |
| SC sk 19 | chr16: 11257590-11257617 |
| SC sk 20 | chr16: 11257589-11257616 |
| SC sk 21 | chr16: 11257571-11257598 |
| SC sk 22 | chr16: 11257568-11257595 |
| SC sk 23 | chr16: 11257561-11257588 |
| SC sk 24 | chr16: 11257559-11257586 |
| SC sk 25 | chr16: 11257556-11257583 |
| SC sk 26 | chr16: 11257555-11257582 |
| SC sk 27 | chr16: 11257552-11257579 |
| SC sk 28 | chr16: 11257542-11257569 |
| SC sk 29 | chr16: 11257541-11257568 |
| SC sk 30 | chr16: 11257540-11257567 |
| SC sk 31 | chr16: 11257533-11257560 |
| SC sk 32 | chr16: 11257530-11257557 |
| SC sk 33 | chr16: 11257525-11257552 |
| SC sk 34 | chr16: 11257524-11257551 |
| SC sk 35 | chr16: 11257523-11257550 |
| SC sk 36 | chr16: 11257519-11257546 |
| SC sk 37 | chr16: 11257518-11257545 |
| SC sk 38 | chr16: 11257517-11257544 |
| SC sk 39 | chr16: 11257514-11257541 |
| SC sk 40 | chr16: 11257511-11257538 |
| SC sk 41 | chr16: 11257510-11257537 |
| SC sk 42 | chr16: 11257506-11257533 |
| SC sk 43 | chr16: 11257505-11257532 |
| SC sk 44 | chr16: 11257500-11257527 |
| SC sk 45 | chr16: 11257499-11257526 |
| SC sk 46 | chr16: 11257495-11257522 |
| SC sk 47 | chr16: 11257492-11257519 |
| SC sk 48 | chr16: 11257491-11257518 |
| SC sk 49 | chr16: 11257483-11257510 |
| SC sk 50 | chr16: 11257469-11257496 |
| SC sk 51 | chr16: 11257460-11257487 |
| SC sk 52 | chr16: 11257452-11257479 |
| SC sk 53 | chr16: 11257451-11257478 |
| SC sk 54 | chr16: 11257448-11257475 |
| SC sk 55 | chr16: 11257431-11257458 |
| SC sk 56 | chr16: 11257415-11257442 |
| SC sk 57 | chr16: 11257414-11257441 |
| SC sk 58 | chr16: 11257403-11257430 |
| SC sk 59 | chr16: 11257402-11257429 |
| SC sk 60 | chr16: 11257396-11257423 |
| SC sk 61 | chr16: 11257391-11257418 |
| SC sk 62 | chr16: 11257389-11257416 |
| SC sk 63 | chr16: 11257388-11257415 |
| SC sk 64 | chr16: 11257384-11257411 |
| SC sk 65 | chr16: 11257379-11257406 |
| SC sk 66 | chr16: 11257375-11257402 |
| SC sk 67 | chr16: 11257374-11257401 |
| SC sk 68 | chr16: 11257373-11257400 |
| SC sk 69 | chr16: 11257363-11257390 |
| SC sk 70 | chr16: 11257362-11257389 |
| SC sk 71 | chr16: 11257361-11257388 |
| SC sk 72 | chr16: 11257343-11257370 |
| SC sk 73 | chr16: 11257341-11257368 |
| SC sk 74 | chr16: 11257334-11257361 |
| SC sk 75 | chr16: 11257331-11257358 |
| SC sk 76 | chr16: 11257317-11257344 |
| SC sk 77 | chr16: 11257308-11257335 |
| SC sk 78 | chr16: 11257301-11257328 |
| SC sk 79 | chr16: 11257300-11257327 |
| SC sk 80 | chr16: 11257295-11257322 |
| SC sk 81 | chr16: 11257289-11257316 |
| SC sk 82 | chr16: 11257237-11257264 |
| SC sk 83 | chr16: 11257236-11257263 |
| SC sk 84 | chr16: 11257235-11257262 |
| SC sk 85 | chr16: 11257231-11257258 |
| SC sk 86 | chr16: 11257229-11257256 |
| SC sk 87 | chr16: 11257228-11257255 |
| SC sk 88 | chr16: 11257224-11257251 |
| SC sk 89 | chr16: 11257221-11257248 |
| SC sk 90 | chr16: 11257220-11257247 |
| SC sk 91 | chr16: 11257217-11257244 |
| SC sk 92 | chr16: 11257217-11257244 |
| SC sk 93 | chr16: 11257214-11257241 |
| SC sk 94 | chr16: 11257213-11257240 |
| SC sk 95 | chr16: 11257213-11257240 |
| SC sk 96 | chr16: 11257212-11257239 |
| SC sk 97 | chr16: 11257209-11257236 |
| SC sk 98 | chr16: 11257207-11257234 |
| SC sk 99 | chr16: 11257206-11257233 |
| SC sk 100 | chr16: 11257205-11257232 |
| SC sk 101 | chr16: 11257201-11257228 |
| SC sk 102 | chr16: 11257196-11257223 |
| SC sk 103 | chr16: 11257195-11257222 |
| SC sk 104 | chr16: 11257181-11257208 |
| SC sk 105 | chr16: 11257172-11257199 |
| SC sk 106 | chr16: 11257169-11257196 |
| SC sk 107 | chr16: 11257168-11257195 |
| SC sk 108 | chr16: 11257167-11257194 |
| SC sk 109 | chr16: 11257166-11257193 |
| SC sk 110 | chr16: 11257161-11257188 |
| SC sk 111 | chr16: 11257154-11257181 |
| SC sk 112 | chr16: 11257150-11257177 |
| SC sk 113 | chr16: 11257149-11257176 |
| SC sk 114 | chr16: 11257148-11257175 |
| SC sk 115 | chr16: 11257144-11257171 |
| SC sk 116 | chr16: 11257143-11257170 |
| SC sk 117 | chr16: 11257142-11257169 |
| SC sk 118 | chr16: 11257141-11257168 |
| SC sk 119 | chr16: 11257136-11257163 |
| SC sk 120 | chr16: 11257133-11257160 |
| SC sk 121 | chr16: 11257132-11257159 |
| SC sk 122 | chr16: 11257127-11257154 |
| SC sk 123 | chr16: 11257119-11257146 |
| SC sk 124 | chr16: 11257114-11257141 |
| SC sk 125 | chr16: 11257113-11257140 |
| SC sk 126 | chr16: 11257112-11257139 |
| SC sk 127 | chr16: 11257096-11257123 |
| SC sk 128 | chr16: 11257075-11257102 |
| SC sk 129 | chr16: 11257074-11257101 |
| SC sk 130 | chr16: 11257062-11257089 |
| SC sk 131 | chr16: 11257044-11257071 |
| SC sk 132 | chr16: 11257029-11257056 |
| SC sk 133 | chr16: 11257026-11257053 |
| SC sk 134 | chr16: 11257025-11257052 |
| SC sk 135 | chr16: 11257024-11257051 |
| SC sk 136 | chr16: 11257020-11257047 |
| SC sk 137 | chr16: 11257020-11257047 |
| SC sk 138 | chr16: 11257015-11257042 |
| SC sk 139 | chr16: 11257014-11257041 |
| SC sk 140 | chr16: 11257013-11257040 |
| SC sk 141 | chr16: 11257009-11257036 |
| SC sk 142 | chr16: 11256986-11257013 |
| SC sk 143 | chr16: 11256980-11257007 |
| SC sk 144 | chr16: 11256972-11256999 |
| SC sk 145 | chr16: 11256971-11256998 |
| SC sk 146 | chr16: 11256959-11256986 |
| SC sk 147 | chr16: 11256948-11256975 |
| SC sk 148 | chr16: 11256947-11256974 |
| SC sk 149 | chr16: 11256943-11256970 |
| SC sk 150 | chr16: 11256942-11256969 |
| SC sk 151 | chr16: 11256941-11256968 |
| SC sk 152 | chr16: 11256938-11256965 |
| SC sk 153 | chr16: 11256938-11256965 |
| SC sk 154 | chr16: 11256937-11256964 |
| SC sk 155 | chr16: 11256937-11256964 |
| SC sk 156 | chr16: 11256936-11256963 |
| SC sk 157 | chr16: 11256932-11256959 |
| SC sk 158 | chr16: 11256931-11256958 |
| SC sk 159 | chr16: 11256930-11256957 |
| SC sk 160 | chr16: 11256922-11256949 |
| SC sk 161 | chr16: 11256921-11256948 |
| SC sk 162 | chr16: 11256920-11256947 |
| SC sk 163 | chr16: 11256918-11256945 |
| SC sk 164 | chr16: 11256917-11256944 |
| SC sk 165 | chr16: 11256914-11256941 |
| SC sk 166 | chr16: 11256908-11256935 |
| SC sk 167 | chr16: 11256900-11256927 |
| SC sk 168 | chr16: 11256899-11256926 |
| SC sk 169 | chr16: 11256888-11256915 |
| SC sk 170 | chr16: 11256880-11256907 |
| SC sk 171 | chr16: 11256877-11256904 |
| SC sk 172 | chr16: 11256870-11256897 |
| SC sk 173 | chr16: 11256869-11256896 |
| SC sk 174 | chr16: 11256865-11256892 |
| SC sk 175 | chr16: 11256864-11256891 |
| SC sk 176 | chr16: 11256863-11256890 |
| SC sk 177 | chr16: 11256862-11256889 |
| SC sk 178 | chr16: 11256860-11256887 |
| SC sk 179 | chr16: 11256859-11256886 |
| SC sk 180 | chr16: 11256858-11256885 |
| SC sk 181 | chr16: 11256858-11256885 |
| SC sk 182 | chr16: 11256857-11256884 |
| SC sk 183 | chr16: 11256856-11256883 |
| SC sk 184 | chr16: 11256855-11256882 |
| SC sk 185 | chr16: 11256854-11256881 |
| SC sk 186 | chr16: 11256853-11256880 |
| SC sk 187 | chr16: 11256850-11256877 |
| SC sk 188 | chr16: 11256847-11256874 |
| SC sk 189 | chr16: 11256834-11256861 |
| SC sk 190 | chr16: 11256834-11256861 |
| SC sk 191 | chr16: 11256833-11256860 |
| SC sk 192 | chr16: 11256832-11256859 |
| SC sk 193 | chr16: 11256820-11256847 |
| SC sk 194 | chr16: 11256819-11256846 |
| SC sk 195 | chr16: 11256814-11256841 |
| SC sk 196 | chr16: 11256814-11256841 |
| SC sk 197 | chr16: 11256811-11256838 |
| SC sk 198 | chr16: 11256809-11256836 |
| SC sk 199 | chr16: 11256802-11256829 |
| SC sk 200 | chr16: 11256795-11256822 |
| SC sk 201 | chr16: 11256794-11256821 |
| SC sk 202 | chr16: 11256793-11256820 |
| SC sk 203 | chr16: 11256781-11256808 |
| SC sk 204 | chr16: 11256778-11256805 |
| SC sk 205 | chr16: 11256772-11256799 |
| SC sk 206 | chr16: 11256771-11256798 |
| SC sk 207 | chr16: 11256766-11256793 |
| SC sk 208 | chr16: 11256763-11256790 |
| SC sk 209 | chr16: 11256762-11256789 |
| SC sk 210 | chr16: 11256762-11256789 |
| SC sk 211 | chr16: 11256758-11256785 |
| SC sk 212 | chr16: 11256757-11256784 |
| SC sk 213 | chr16: 11256757-11256784 |
| SC sk 214 | chr16: 11256756-11256783 |
| SC sk 215 | chr16: 11256751-11256778 |
| SC sk 216 | chr16: 11256750-11256777 |
| SC sk 217 | chr16: 11256749-11256776 |
| SC sk 218 | chr16: 11256744-11256771 |
| SC sk 219 | chr16: 11256741-11256768 |
| SC sk 220 | chr16: 11256740-11256767 |
| SC sk 221 | chr16: 11256738-11256765 |
| SC sk 222 | chr16: 11256737-11256764 |
| SC sk 223 | chr16: 11256736-11256763 |
| SC sk 224 | chr16: 11256734-11256761 |
| SC sk 225 | chr16: 11256727-11256754 |
| SC sk 226 | chr16: 11256726-11256753 |
| SC sk 227 | chr16: 11256717-11256744 |
| SC sk 228 | chr16: 11256714-11256741 |
| SC sk 229 | chr16: 11256713-11256740 |
| SC sk 230 | chr16: 11256710-11256737 |
| SC sk 231 | chr16: 11256704-11256731 |
| SC sk 232 | chr16: 11256703-11256730 |
| SC sk 233 | chr16: 11256702-11256729 |
| SC sk 234 | chr16: 11256697-11256724 |
| SC sk 235 | chr16: 11256694-11256721 |
| SC sk 236 | chr16: 11256693-11256720 |
| SC sk 237 | chr16: 11256692-11256719 |
| SC sk 238 | chr16: 11256691-11256718 |
| SC sk 239 | chr16: 11256684-11256711 |
| SC sk 240 | chr16: 11256683-11256710 |
| SC sk 241 | chr16: 11256680-11256707 |
| SC sk 242 | chr16: 11256679-11256706 |
| SC sk 243 | chr16: 11256678-11256705 |
| SC sk 244 | chr16: 11256673-11256700 |
| SC sk 245 | chr16: 11256667-11256694 |
| SC sk 246 | chr16: 11256666-11256693 |
| SC sk 247 | chr16: 11256662-11256689 |
| SC sk 248 | chr16: 11256661-11256688 |
| SC sk 249 | chr16: 11256660-11256687 |
| SC sk 250 | chr16: 11256647-11256674 |
| SC sk 251 | chr16: 11256638-11256665 |
| SC sk 252 | chr16: 11256637-11256664 |
| SC sk 253 | chr16: 11256636-11256663 |
| SC sk 254 | chr16: 11256635-11256662 |
| SC sk 255 | chr16: 11256629-11256656 |
| SC sk 256 | chr16: 11256629-11256656 |
| SC sk 257 | chr16: 11256622-11256649 |
| SC sk 258 | chr16: 11256621-11256648 |
| SC sk 259 | chr16: 11256620-11256647 |
| SC sk 260 | chr16: 11256619-11256646 |
| SC sk 261 | chr16: 11256617-11256644 |
| SC sk 262 | chr16: 11256616-11256643 |
| SC sk 263 | chr16: 11256612-11256639 |
| SC sk 264 | chr16: 11256607-11256634 |
| SC sk 265 | chr16: 11256606-11256633 |
| SC sk 266 | chr16: 11256594-11256621 |
| SC sk 267 | chr16: 11256591-11256618 |
| SC sk 268 | chr16: 11256590-11256617 |
| SC sk 269 | chr16: 11256585-11256612 |
| SC sk 270 | chr16: 11256575-11256602 |
| SC sk 271 | chr16: 11256574-11256601 |
| SC sk 272 | chr16: 11256573-11256600 |
| SC sk 273 | chr16: 11256573-11256600 |
| SC sk 274 | chr16: 11256572-11256599 |
| SC sk 275 | chr16: 11256571-11256598 |
| SC sk 276 | chr16: 11256570-11256597 |
| SC sk 277 | chr16: 11256570-11256597 |
| SC sk 278 | chr16: 11256567-11256594 |
| SC sk 279 | chr16: 11256564-11256591 |
| SC sk 280 | chr16: 11256563-11256590 |
| SC sk 281 | chr16: 11256554-11256581 |
| SC sk 282 | chr16: 11256553-11256580 |
| SC sk 283 | chr16: 11256539-11256566 |
| SC sk 284 | chr16: 11256538-11256565 |
| SC sk 285 | chr16: 11256533-11256560 |
| SC sk 286 | chr16: 11256530-11256557 |
| SC sk 287 | chr16: 11256520-11256547 |
| SC sk 288 | chr16: 11256520-11256547 |
| SC sk 289 | chr16: 11256519-11256546 |
| SC sk 290 | chr16: 11256511-11256538 |
| SC sk 291 | chr16: 11256510-11256537 |
| SC sk 292 | chr16: 11256505-11256532 |
| SC sk 293 | chr16: 11256504-11256531 |
| SC sk 294 | chr16: 11256503-11256530 |
| SC sk 295 | chr16: 11256494-11256521 |
| SC sk 296 | chr16: 11256493-11256520 |
| SC sk 297 | chr16: 11256492-11256519 |
| SC sk 298 | chr16: 11256490-11256517 |
| SC sk 299 | chr16: 11256489-11256516 |
| SC sk 300 | chr16: 11256476-11256503 |
| SC sk 301 | chr16: 11256473-11256500 |
| SC sk 302 | chr16: 11256472-11256499 |
| SC sk 303 | chr16: 11256471-11256498 |
| SC sk 304 | chr16: 11256461-11256488 |
| SC sk 305 | chr16: 11256459-11256486 |
| SC sk 306 | chr16: 11256455-11256482 |
| SC sk 307 | chr16: 11256455-11256482 |
| SC sk 308 | chr16: 11256451-11256478 |
| SC sk 309 | chr16: 11256445-11256472 |
| SC sk 310 | chr16: 11256444-11256471 |
| SC sk 311 | chr16: 11256442-11256469 |
| SC sk 312 | chr16: 11256440-11256467 |
| SC sk 313 | chr16: 11256439-11256466 |
| SC sk 314 | chr16: 11256438-11256465 |
| SC sk 315 | chr16: 11256431-11256458 |
| SC sk 316 | chr16: 11256420-11256447 |
| SC sk 317 | chr16: 11256417-11256444 |
| SC sk 318 | chr16: 11256416-11256443 |
| SC sk 319 | chr16: 11256410-11256437 |
| SC sk 320 | chr16: 11256410-11256437 |
| SC sk 321 | chr16: 11256409-11256436 |
| SC sk 322 | chr16: 11256408-11256435 |
| SC sk 323 | chr16: 11256404-11256431 |
| SC sk 324 | chr16: 11256404-11256431 |
| SC sk 325 | chr16: 11256403-11256430 |
| SC sk 326 | chr16: 11256402-11256429 |
| SC sk 327 | chr16: 11256394-11256421 |
| SC sk 328 | chr16: 11256391-11256418 |
| SC sk 329 | chr16: 11256390-11256417 |
| SC sk 330 | chr16: 11256384-11256411 |
| SC sk 331 | chr16: 11256383-11256410 |
| SC sk 332 | chr16: 11256375-11256402 |
| SC sk 333 | chr16: 11256374-11256401 |
| SC sk 334 | chr16: 11256371-11256398 |
| SC sk 335 | chr16: 11256370-11256397 |
| SC sk 336 | chr16: 11256357-11256384 |
| SC sk 337 | chr16: 11256356-11256383 |
| SC sk 338 | chr16: 11256355-11256382 |
| SC sk 339 | chr16: 11256354-11256381 |
| SC sk 340 | chr16: 11256353-11256380 |
| SC sk 341 | chr16: 11256349-11256376 |
| SC sk 342 | chr16: 11256348-11256375 |
| SC sk 343 | chr16: 11256341-11256368 |
| SC sk 344 | chr16: 11256339-11256366 |
| SC sk 345 | chr16: 11256329-11256356 |
| SC sk 346 | chr16: 11256320-11256347 |
| SC sk 347 | chr16: 11256317-11256344 |
| SC sk 348 | chr16: 11256310-11256337 |
| SC sk 349 | chr16: 11256305-11256332 |
| SC sk 350 | chr16: 11256298-11256325 |
| SC sk 351 | chr16: 11256298-11256325 |
| SC sk 352 | chr16: 11256295-11256322 |
| SC sk 353 | chr16: 11256292-11256319 |
| SC sk 354 | chr16: 11256291-11256318 |
| SC sk 355 | chr16: 11256290-11256317 |
| SC sk 356 | chr16: 11256289-11256316 |
| SC sk 357 | chr16: 11256286-11256313 |
| SC sk 358 | chr16: 11256285-11256312 |
| SC sk 359 | chr16: 11256284-11256311 |
| SC sk 360 | chr16: 11256280-11256307 |
| SC sk 361 | chr16: 11256280-11256307 |
| SC sk 362 | chr16: 11256276-11256303 |
| SC sk 363 | chr16: 11256275-11256302 |
| SC sk 364 | chr16: 11256274-11256301 |
| SC sk 365 | chr16: 11256273-11256300 |
| SC sk 366 | chr16: 11256270-11256297 |
| SC sk 367 | chr16: 11256269-11256296 |
| SC sk 368 | chr16: 11256268-11256295 |
| SC sk 369 | chr16: 11256256-11256283 |
| SC sk 370 | chr16: 11256240-11256267 |
| SC sk 371 | chr16: 11256237-11256264 |
| SC sk 372 | chr16: 11256236-11256263 |
| SC sk 373 | chr16: 11256234-11256261 |
| SC sk 374 | chr16: 11256233-11256260 |
| SC sk 375 | chr16: 11256227-11256254 |
| SC sk 376 | chr16: 11256223-11256250 |
| SC sk 377 | chr16: 11256222-11256249 |
| SC sk 378 | chr16: 11256221-11256248 |
| SC sk 379 | chr16: 11256221-11256248 |
| SC sk 380 | chr16: 11256218-11256245 |
| SC sk 381 | chr16: 11256215-11256242 |
| SC sk 382 | chr16: 11256215-11256242 |
| SC sk 383 | chr16: 11256214-11256241 |
| SC sk 384 | chr16: 11256213-11256240 |
| SC sk 385 | chr16: 11256210-11256237 |
| SC sk 386 | chr16: 11256210-11256237 |
| SC sk 387 | chr16: 11256209-11256236 |
| SC sk 388 | chr16: 11256187-11256214 |
| SC sk 389 | chr16: 11256181-11256208 |
| SC sk 390 | chr16: 11256179-11256206 |
| SC sk 391 | chr16: 11256170-11256197 |
| SC sk 392 | chr16: 11256163-11256190 |
| SC sk 393 | chr16: 11256159-11256186 |
| SC sk 394 | chr16: 11256157-11256184 |
| SC sk 395 | chr16: 11256140-11256167 |
| SC sk 396 | chr16: 11256135-11256162 |
| SC sk 397 | chr16: 11256134-11256161 |
| SC sk 398 | chr16: 11256134-11256161 |
| SC sk 399 | chr16: 11256133-11256160 |
| SC sk 400 | chr16: 11256124-11256151 |
| SC sk 401 | chr16: 11256115-11256142 |
| SC sk 402 | chr16: 11256112-11256139 |
| SC sk 403 | chr16: 11256111-11256138 |
| SC sk 404 | chr16: 11256110-11256137 |
| SC sk 405 | chr16: 11256102-11256129 |
| SC sk 406 | chr16: 11256101-11256128 |
| SC sk 407 | chr16: 11256100-11256127 |
| SC sk 408 | chr16: 11256100-11256127 |
| SC sk 409 | chr16: 11256094-11256121 |
| SC sk 410 | chr16: 11256093-11256120 |
| SC sk 411 | chr16: 11256092-11256119 |
| SC sk 412 | chr16: 11256091-11256118 |
| SC sk 413 | chr16: 11256090-11256117 |
| SC sk 414 | chr16: 11256087-11256114 |
| SC sk 415 | chr16: 11256083-11256110 |
| SC sk 416 | chr16: 11256082-11256109 |
| SC sk 417 | chr16: 11256079-11256106 |
| SC sk 418 | chr16: 11256078-11256105 |
| SC sk 419 | chr16: 11256078-11256105 |
| SC sk 420 | chr16: 11256070-11256097 |
| SC sk 421 | chr16: 11256069-11256096 |
| SC sk 422 | chr16: 11256069-11256096 |
| SC sk 423 | chr16: 11256068-11256095 |
| SC sk 424 | chr16: 11256063-11256090 |
| SC sk 425 | chr16: 11256063-11256090 |
| SC sk 426 | chr16: 11256062-11256089 |
| SC sk 427 | chr16: 11256062-11256089 |
| SC sk 428 | chr16: 11256061-11256088 |
| SC sk 429 | chr16: 11256058-11256085 |
| SC sk 430 | chr16: 11256057-11256084 |
| SC sk 431 | chr16: 11256055-11256082 |
| SC sk 432 | chr16: 11256054-11256081 |
| SC sk 433 | chr16: 11256051-11256078 |
| SC sk 434 | chr16: 11256050-11256077 |
| SC sk 435 | chr16: 11256047-11256074 |
| SC sk 436 | chr16: 11256046-11256073 |
| SC sk 437 | chr16: 11256046-11256073 |
| SC sk 438 | chr16: 11256043-11256070 |
| SC sk 439 | chr16: 11256041-11256068 |
| SC sk 440 | chr16: 11256040-11256067 |
| SC sk 441 | chr16: 11256040-11256067 |
| SC sk 442 | chr16: 11256039-11256066 |
| SC sk 443 | chr16: 11256036-11256063 |
| SC sk 444 | chr16: 11256035-11256062 |
| SC sk 445 | chr16: 11256034-11256061 |
| SC sk 446 | chr16: 11256026-11256053 |
| SC sk 447 | chr16: 11256025-11256052 |
| SC sk 448 | chr16: 11256017-11256044 |
| SC sk 449 | chr16: 11256011-11256038 |
| SC sk 450 | chr16: 11256010-11256037 |
| SC sk 451 | chr16: 11256003-11256030 |
| SC sk 452 | chr16: 11256000-11256027 |
| SC sk 453 | chr16: 11255999-11256026 |
| SC sk 454 | chr16: 11255998-11256025 |
| SC sk 455 | chr16: 11255997-11256024 |
| SC sk 456 | chr16: 11255994-11256021 |
| SC sk 457 | chr16: 11255986-11256013 |
| SC sk 458 | chr16: 11255985-11256012 |
| SC sk 459 | chr16: 11255984-11256011 |
| SC sk 460 | chr16: 11255978-11256005 |
| SC sk 461 | chr16: 11255978-11256005 |
| SC sk 462 | chr16: 11255953-11255980 |
| SC sk 463 | chr16: 11255950-11255977 |
| SC sk 464 | chr16: 11255942-11255969 |
| SC sk 465 | chr16: 11255942-11255969 |
| SC sk 466 | chr16: 11255941-11255968 |
| SC sk 467 | chr16: 11255940-11255967 |
| SC sk 468 | chr16: 11255935-11255962 |
| SC sk 469 | chr16: 11255934-11255961 |
| SC sk 470 | chr16: 11255929-11255956 |
| SC sk 471 | chr16: 11255925-11255952 |
| SC sk 472 | chr16: 11255925-11255952 |
| SC sk 473 | chr16: 11255924-11255951 |
| SC sk 474 | chr16: 11255924-11255951 |
| SC sk 475 | chr16: 11255923-11255950 |
| SC sk 476 | chr16: 11255923-11255950 |
| SC sk 477 | chr16: 11255920-11255947 |
| SC sk 478 | chr16: 11255919-11255946 |
| SC sk 479 | chr16: 11255914-11255941 |
| SC sk 480 | chr16: 11255911-11255938 |
| SC sk 481 | chr16: 11255910-11255937 |
| SC sk 482 | chr16: 11255909-11255936 |
| SC sk 483 | chr16: 11255908-11255935 |
| SC sk 484 | chr16: 11255907-11255934 |
| SC sk 485 | chr16: 11255898-11255925 |
| SC sk 486 | chr16: 11255893-11255920 |
| SC sk 487 | chr16: 11255892-11255919 |
| SC sk 488 | chr16: 11255881-11255908 |
| SC sk 489 | chr16: 11255874-11255901 |
| SC sk 490 | chr16: 11255872-11255899 |
| SC sk 491 | chr16: 11255870-11255897 |
| SC sk 492 | chr16: 11255869-11255896 |
| SC sk 493 | chr16: 11255867-11255894 |
| SC sk 494 | chr16: 11255864-11255891 |
| SC sk 495 | chr16: 11255863-11255890 |
| SC sk 496 | chr16: 11255855-11255882 |
| SC sk 497 | chr16: 11255855-11255882 |
| SC sk 498 | chr16: 11255854-11255881 |
| SC sk 499 | chr16: 11255849-11255876 |
| SC sk 500 | chr16: 11255847-11255874 |
| SC sk 501 | chr16: 11255844-11255871 |
| SC sk 502 | chr16: 11255841-11255868 |
| SC sk 503 | chr16: 11255840-11255867 |
| SC sk 504 | chr16: 11255837-11255864 |
| SC sk 505 | chr16: 11255836-11255863 |
| SC sk 506 | chr16: 11255835-11255862 |
| SC sk 507 | chr16: 11255834-11255861 |
| SC sk 508 | chr16: 11255833-11255860 |
| SC sk 509 | chr16: 11255832-11255859 |
| SC sk 510 | chr16: 11255830-11255857 |
| SC sk 511 | chr16: 11255827-11255854 |
| SC sk 512 | chr16: 11255822-11255849 |
| SC sk 513 | chr16: 11255821-11255848 |
| SC sk 514 | chr16: 11255820-11255847 |
| SC sk 515 | chr16: 11255816-11255843 |
| SC sk 516 | chr16: 11255812-11255839 |
| SC sk 517 | chr16: 11255808-11255835 |
| SC sk 518 | chr16: 11255798-11255825 |
| SC sk 519 | chr16: 11255796-11255823 |
| SC sk 520 | chr16: 11255792-11255819 |
| SC sk 521 | chr16: 11255778-11255805 |
| SC sk 522 | chr16: 11255772-11255799 |
| SC sk 523 | chr16: 11255772-11255799 |
| SC sk 524 | chr16: 11255762-11255789 |
| SC sk 525 | chr16: 11255761-11255788 |
| SC sk 526 | chr16: 11255759-11255786 |
| SC sk 527 | chr16: 11255756-11255783 |
| SC sk 528 | chr16: 11255755-11255782 |
| SC sk 529 | chr16: 11255755-11255782 |
| SC sk 530 | chr16: 11255754-11255781 |
| SC sk 531 | chr16: 11255753-11255780 |
| SC sk 532 | chr16: 11255752-11255779 |
| SC sk 533 | chr16: 11255739-11255766 |
| SC sk 534 | chr16: 11255738-11255765 |
| SC sk 535 | chr16: 11255731-11255758 |
| SC sk 536 | chr16: 11255724-11255751 |
| SC sk 537 | chr16: 11255724-11255751 |
| SC sk 538 | chr16: 11255723-11255750 |
| SC sk 539 | chr16: 11255721-11255748 |
| SC sk 540 | chr16: 11255718-11255745 |
| SC sk 541 | chr16: 11255715-11255742 |
| SC sk 542 | chr16: 11255710-11255737 |
| SC sk 543 | chr16: 11255710-11255737 |
| SC sk 544 | chr16: 11255709-11255736 |
| SC sk 545 | chr16: 11255708-11255735 |
| SC sk 546 | chr16: 11255707-11255734 |
| SC sk 547 | chr16: 11255704-11255731 |
| SC sk 548 | chr16: 11255703-11255730 |
| SC sk 549 | chr16: 11255700-11255727 |
| SC sk 550 | chr16: 11255688-11255715 |
| SC sk 551 | chr16: 11255674-11255701 |
| SC sk 552 | chr16: 11255673-11255700 |
| SC sk 553 | chr16: 11255672-11255699 |
| SC sk 554 | chr16: 11255666-11255693 |
| SC sk 555 | chr16: 11255656-11255683 |
| SC sk 556 | chr16: 11255655-11255682 |
| SC sk 557 | chr16: 11255650-11255677 |
| SC sk 558 | chr16: 11255636-11255663 |
| SC sk 559 | chr16: 11255628-11255655 |
| SC sk 560 | chr16: 11255627-11255654 |
| SC sk 561 | chr16: 11255623-11255650 |
| SC sk 562 | chr16: 11255622-11255649 |
| SC sk 563 | chr16: 11255618-11255645 |
| SC sk 564 | chr16: 11255614-11255641 |
| SC sk 565 | chr16: 11255613-11255640 |
| SC sk 566 | chr16: 11255609-11255636 |
| SC sk 567 | chr16: 11255608-11255635 |
| SC sk 568 | chr16: 11255607-11255634 |
| SC sk 569 | chr16: 11255606-11255633 |
| SC sk 570 | chr16: 11255599-11255626 |
| SC sk 571 | chr16: 11255598-11255625 |
| SC sk 572 | chr16: 11255593-11255620 |
| SC sk 573 | chr16: 11255590-11255617 |
| SC sk 574 | chr16: 11255588-11255615 |
| SC sk 575 | chr16: 11255584-11255611 |
| SC sk 576 | chr16: 11255581-11255608 |
| SC sk 577 | chr16: 11255578-11255605 |
| SC sk 578 | chr16: 11255577-11255604 |
| SC sk 579 | chr16: 11255574-11255601 |
| SC sk 580 | chr16: 11255569-11255596 |
| SC sk 581 | chr16: 11255564-11255591 |
| SC sk 582 | chr16: 11255560-11255587 |
| SC sk 583 | chr16: 11255550-11255577 |
| SC sk 584 | chr16: 11255546-11255573 |
| SC sk 585 | chr16: 11255545-11255572 |
| SC sk 586 | chr16: 11255541-11255568 |
| SC sk 587 | chr16: 11255540-11255567 |
| SC sk 588 | chr16: 11255539-11255566 |
| SC sk 589 | chr16: 11255531-11255558 |
| SC sk 590 | chr16: 11255530-11255557 |
| SC sk 591 | chr16: 11255529-11255556 |
| SC sk 592 | chr16: 11255521-11255548 |
| SC sk 593 | chr16: 11255518-11255545 |
| SC sk 594 | chr16: 11255509-11255536 |
| SC sk 595 | chr16: 11255508-11255535 |
| SC sk 596 | chr16: 11255507-11255534 |
| SC sk 597 | chr16: 11255497-11255524 |
| SC sk 598 | chr16: 11255496-11255523 |
| SC sk 599 | chr16: 11255496-11255523 |
| SC sk 600 | chr16: 11255495-11255522 |
| SC sk 601 | chr16: 11255494-11255521 |
| SC sk 602 | chr16: 11255492-11255519 |
| SC sk 603 | chr16: 11255481-11255508 |
| SC sk 604 | chr16: 11255480-11255507 |
| SC sk 605 | chr16: 11255479-11255506 |
| SC sk 606 | chr16: 11255477-11255504 |
| SC sk 607 | chr16: 11255476-11255503 |
| SC sk 608 | chr16: 11255475-11255502 |
| SC sk 609 | chr16: 11255475-11255502 |
| SC sk 610 | chr16: 11254808-11254835 |
| SC sk 611 | chr16: 11254807-11254834 |
| SC sk 612 | chr16: 11254806-11254833 |
| SC sk 613 | chr16: 11254805-11254832 |
| SC sk 614 | chr16: 11254802-11254829 |
| SC sk 615 | chr16: 11254776-11254803 |
| SC sk 616 | chr16: 11254776-11254803 |
| SC sk 617 | chr16: 11254766-11254793 |
| SC sk 618 | chr16: 11254765-11254792 |
| SC sk 619 | chr16: 11254753-11254780 |
| SC sk 620 | chr16: 11254753-11254780 |
| SC sk 621 | chr16: 11254748-11254775 |
| SC sk 622 | chr16: 11254747-11254774 |
| SC sk 623 | chr16: 11254746-11254773 |
| SC sk 624 | chr16: 11254743-11254770 |
| SC sk 625 | chr16: 11254740-11254767 |
| SC sk 626 | chr16: 11254739-11254766 |
| SC sk 627 | chr16: 11254735-11254762 |
| SC sk 628 | chr16: 11254734-11254761 |
| SC sk 629 | chr16: 11254734-11254761 |
| SC sk 630 | chr16: 11254731-11254758 |
| SC sk 631 | chr16: 11254730-11254757 |
| SC sk 632 | chr16: 11254730-11254757 |
| SC sk 633 | chr16: 11254729-11254756 |
| SC sk 634 | chr16: 11254729-11254756 |
| SC sk 635 | chr16: 11254725-11254752 |
| SC sk 636 | chr16: 11254723-11254750 |
| SC sk 637 | chr16: 11254722-11254749 |
| SC sk 638 | chr16: 11254721-11254748 |
| SC sk 639 | chr16: 11254716-11254743 |
| SC sk 640 | chr16: 11254700-11254727 |
| SC sk 641 | chr16: 11254696-11254723 |
| SC sk 642 | chr16: 11254688-11254715 |
| SC sk 643 | chr16: 11254686-11254713 |
| SC sk 644 | chr16: 11254683-11254710 |
| SC sk 645 | chr16: 11254682-11254709 |
| SC sk 646 | chr16: 11254679-11254706 |
| SC sk 647 | chr16: 11254678-11254705 |
| SC sk 648 | chr16: 11254661-11254688 |
| SC sk 649 | chr16: 11254660-11254687 |
| SC sk 650 | chr16: 11254660-11254687 |
| SC sk 651 | chr16: 11254659-11254686 |
| SC sk 652 | chr16: 11254658-11254685 |
| SC sk 653 | chr16: 11254653-11254680 |
| SC sk 654 | chr16: 11254652-11254679 |
| SC sk 655 | chr16: 11254651-11254678 |
| SC sk 656 | chr16: 11254643-11254670 |
| SC sk 657 | chr16: 11254643-11254670 |
| SC sk 658 | chr16: 11254631-11254658 |
| SC sk 659 | chr16: 11254630-11254657 |
| SC sk 660 | chr16: 11254629-11254656 |
| SC sk 661 | chr16: 11254626-11254653 |
| SC sk 662 | chr16: 11254625-11254652 |
| SC sk 663 | chr16: 11254624-11254651 |
| SC sk 664 | chr16: 11254623-11254650 |
| SC sk 665 | chr16: 11254621-11254648 |
| SC sk 666 | chr16: 11254620-11254647 |
| SC sk 667 | chr16: 11254611-11254638 |
| SC sk 668 | chr16: 11254610-11254637 |
| SC sk 669 | chr16: 11254601-11254628 |
| SC sk 670 | chr16: 11254600-11254627 |
| SC sk 671 | chr16: 11254599-11254626 |
| SC sk 672 | chr16: 11254598-11254625 |
| SC sk 673 | chr16: 11254594-11254621 |
| SC sk 674 | chr16: 11254587-11254614 |
| SC sk 675 | chr16: 11254564-11254591 |
| SC sk 676 | chr16: 11254558-11254585 |
| SC sk 677 | chr16: 11254546-11254573 |
| SC sk 678 | chr16: 11254543-11254570 |
| SC sk 679 | chr16: 11254539-11254566 |
| SC sk 680 | chr16: 11254523-11254550 |
| SC sk 681 | chr16: 11254522-11254549 |
| SC sk 682 | chr16: 11254521-11254548 |
| SC sk 683 | chr16: 11254519-11254546 |
| SC sk 684 | chr16: 11254518-11254545 |
| SC sk 685 | chr16: 11254517-11254544 |
| SC sk 686 | chr16: 11254516-11254543 |
| SC sk 687 | chr16: 11254515-11254542 |
| SC sk 688 | chr16: 11254514-11254541 |
| SC sk 689 | chr16: 11254511-11254538 |
| SC sk 690 | chr16: 11254510-11254537 |
| SC sk 691 | chr16: 11254503-11254530 |
| SC sk 692 | chr16: 11254500-11254527 |
| SC sk 693 | chr16: 11254451-11254478 |
| SC sk 694 | chr16: 11254448-11254475 |

TABLE 3D
Human CBLB genomic coordinate of the present invention

| No. | Chromosomal coordinate range |
|---|---|
| CB sk 1 | chr3: 105655489-105655516 |
| CB sk 2 | chr3: 105655515-105655542 |
| CB sk 3 | chr3: 105655528-105655555 |
| CB sk 4 | chr3: 105655581-105655608 |
| CB sk 5 | chr3: 105655584-105655611 |
| CB sk 6 | chr3: 105655611-105655638 |
| CB sk 7 | chr3: 105655612-105655639 |
| CB sk 8 | chr3: 105655613-105655640 |
| CB sk 9 | chr3: 105655635-105655662 |
| CB sk 10 | chr3: 105655647-105655674 |
| CB sk 11 | chr3: 105655648-105655675 |
| CB sk 12 | chr3: 105655679-105655706 |
| CB sk 13 | chr3: 105655684-105655711 |
| CB sk 14 | chr3: 105655685-105655712 |
| CB sk 15 | chr3: 105655687-105655714 |
| CB sk 16 | chr3: 105655702-105655729 |
| CB sk 17 | chr3: 105655720-105655747 |
| CB sk 18 | chr3: 105655752-105655779 |
| CB sk 19 | chr3: 105655790-105655817 |
| CB sk 20 | chr3: 105655834-105655861 |
| CB sk 21 | chr3: 105655846-105655873 |
| CB sk 22 | chr3: 105655899-105655926 |
| CB sk 23 | chr3: 105655926-105655953 |
| CB sk 24 | chr3: 105655927-105655954 |
| CB sk 25 | chr3: 105655949-105655976 |
| CB sk 26 | chr3: 105655950-105655977 |
| CB sk 27 | chr3: 105655956-105655983 |
| CB sk 28 | chr3: 105655957-105655984 |
| CB sk 29 | chr3: 105655979-105656006 |
| CB sk 30 | chr3: 105655980-105656007 |
| CB sk 31 | chr3: 105655987-105656014 |
| CB sk 32 | chr3: 105655988-105656015 |
| CB sk 33 | chr3: 105655999-105656026 |
| CB sk 34 | chr3: 105656000-105656027 |
| CB sk 35 | chr3: 105656012-105656039 |
| CB sk 36 | chr3: 105656024-105656051 |
| CB sk 37 | chr3: 105656028-105656055 |
| CB sk 38 | chr3: 105656078-105656105 |
| CB sk 39 | chr3: 105656099-105656126 |
| CB sk 40 | chr3: 105656100-105656127 |
| CB sk 41 | chr3: 105656101-105656128 |
| CB sk 42 | chr3: 105656117-105656144 |
| CB sk 43 | chr3: 105656132-105656159 |
| CB sk 44 | chr3: 105656145-105656172 |
| CB sk 45 | chr3: 105656176-105656203 |
| CB sk 46 | chr3: 105656177-105656204 |
| CB sk 47 | chr3: 105656179-105656206 |
| CB sk 48 | chr3: 105656181-105656208 |
| CB sk 49 | chr3: 105656182-105656209 |
| CB sk 50 | chr3: 105656189-105656216 |
| CB sk 51 | chr3: 105656190-105656217 |
| CB sk 52 | chr3: 105656191-105656218 |
| CB sk 53 | chr3: 105656201-105656228 |
| CB sk 54 | chr3: 105656229-105656256 |
| CB sk 55 | chr3: 105656291-105656318 |
| CB sk 56 | chr3: 105656295-105656322 |
| CB sk 57 | chr3: 105656301-105656328 |
| CB sk 58 | chr3: 105656312-105656339 |
| CB sk 59 | chr3: 105656334-105656361 |
| CB sk 60 | chr3: 105656369-105656396 |
| CB sk 61 | chr3: 105656391-105656418 |
| CB sk 62 | chr3: 105656405-105656432 |
| CB sk 63 | chr3: 105656421-105656448 |
| CB sk 64 | chr3: 105656422-105656449 |
| CB sk 65 | chr3: 105656481-105656508 |
| CB sk 66 | chr3: 105656493-105656520 |
| CB sk 67 | chr3: 105656516-105656543 |
| CB sk 68 | chr3: 105656551-105656578 |
| CB sk 69 | chr3: 105656554-105656581 |
| CB sk 70 | chr3: 105656558-105656585 |
| CB sk 71 | chr3: 105656611-105656638 |
| CB sk 72 | chr3: 105656612-105656639 |
| CB sk 73 | chr3: 105656613-105656640 |
| CB sk 74 | chr3: 105656614-105656641 |
| CB sk 75 | chr3: 105656615-105656642 |
| CB sk 76 | chr3: 105656618-105656645 |
| CB sk 77 | chr3: 105656619-105656646 |
| CB sk 78 | chr3: 105656620-105656647 |
| CB sk 79 | chr3: 105656621-105656648 |
| CB sk 80 | chr3: 105656622-105656649 |
| CB sk 81 | chr3: 105656625-105656652 |
| CB sk 82 | chr3: 105656626-105656653 |
| CB sk 83 | chr3: 105656627-105656654 |
| CB sk 84 | chr3: 105656628-105656655 |
| CB sk 85 | chr3: 105656641-105656668 |
| CB sk 86 | chr3: 105656658-105656685 |
| CB sk 87 | chr3: 105656666-105656693 |
| CB sk 88 | chr3: 105656745-105656772 |
| CB sk 89 | chr3: 105656777-105656804 |
| CB sk 90 | chr3: 105656787-105656814 |
| CB sk 91 | chr3: 105656815-105656842 |
| CB sk 92 | chr3: 105656825-105656852 |
| CB sk 93 | chr3: 105656828-105656855 |
| CB sk 94 | chr3: 105656851-105656878 |
| CB sk 95 | chr3: 105656853-105656880 |
| CB sk 96 | chr3: 105656873-105656900 |
| CB sk 97 | chr3: 105656901-105656928 |
| CB sk 98 | chr3: 105656902-105656929 |
| CB sk 99 | chr3: 105656903-105656930 |
| CB sk 100 | chr3: 105656954-105656981 |
| CB sk 101 | chr3: 105656977-105657004 |
| CB sk 102 | chr3: 105656978-105657005 |
| CB sk 103 | chr3: 105656992-105657019 |
| CB sk 104 | chr3: 105656994-105657021 |
| CB sk 105 | chr3: 105657015-105657042 |
| CB sk 106 | chr3: 105657016-105657043 |
| CB sk 107 | chr3: 105657033-105657060 |
| CB sk 108 | chr3: 105657034-105657061 |
| CB sk 109 | chr3: 105657035-105657062 |
| CB sk 110 | chr3: 105657038-105657065 |
| CB sk 111 | chr3: 105657050-105657077 |
| CB sk 112 | chr3: 105657061-105657088 |
| CB sk 113 | chr3: 105657074-105657101 |
| CB sk 114 | chr3: 105657095-105657122 |
| CB sk 115 | chr3: 105657096-105657123 |
| CB sk 116 | chr3: 105657102-105657129 |
| CB sk 117 | chr3: 105657111-105657138 |
| CB sk 118 | chr3: 105657123-105657150 |
| CB sk 119 | chr3: 105657124-105657151 |
| CB sk 120 | chr3: 105657132-105657159 |
| CB sk 121 | chr3: 105657144-105657171 |
| CB sk 122 | chr3: 105657167-105657194 |
| CB sk 123 | chr3: 105657168-105657195 |
| CB sk 124 | chr3: 105657184-105657211 |
| CB sk 125 | chr3: 105657189-105657216 |
| CB sk 126 | chr3: 105657190-105657217 |
| CB sk 127 | chr3: 105657234-105657261 |
| CB sk 128 | chr3: 105657237-105657264 |
| CB sk 129 | chr3: 105657245-105657272 |
| CB sk 130 | chr3: 105657254-105657281 |
| CB sk 131 | chr3: 105657258-105657285 |
| CB sk 132 | chr3: 105657264-105657291 |
| CB sk 133 | chr3: 105657274-105657301 |
| CB sk 134 | chr3: 105657290-105657317 |
| CB sk 135 | chr3: 105657293-105657320 |
| CB sk 136 | chr3: 105657294-105657321 |
| CB sk 137 | chr3: 105657311-105657338 |
| CB sk 138 | chr3: 105657360-105657387 |
| CB sk 139 | chr3: 105657361-105657388 |
| CB sk 140 | chr3: 105657368-105657395 |
| CB sk 141 | chr3: 105657369-105657396 |
| CB sk 142 | chr3: 105657372-105657399 |
| CB sk 143 | chr3: 105657435-105657462 |
| CB sk 144 | chr3: 105657445-105657472 |
| CB sk 145 | chr3: 105657446-105657473 |
| CB sk 146 | chr3: 105657462-105657489 |
| CB sk 147 | chr3: 105657463-105657490 |
| CB sk 148 | chr3: 105657464-105657491 |
| CB sk 149 | chr3: 105657465-105657492 |
| CB sk 150 | chr3: 105657466-105657493 |
| CB sk 151 | chr3: 105657478-105657505 |
| CB sk 152 | chr3: 105657485-105657512 |
| CB sk 153 | chr3: 105657486-105657513 |
| CB sk 154 | chr3: 105657497-105657524 |
| CB sk 155 | chr3: 105657501-105657528 |
| CB sk 156 | chr3: 105657543-105657570 |
| CB sk 157 | chr3: 105657609-105657636 |
| CB sk 158 | chr3: 105657619-105657646 |
| CB sk 159 | chr3: 105657650-105657677 |
| CB sk 160 | chr3: 105657685-105657712 |
| CB sk 161 | chr3: 105657689-105657716 |
| CB sk 162 | chr3: 105657693-105657720 |
| CB sk 163 | chr3: 105657696-105657723 |
| CB sk 164 | chr3: 105657731-105657758 |
| CB sk 165 | chr3: 105657736-105657763 |
| CB sk 166 | chr3: 105657847-105657874 |
| CB sk 167 | chr3: 105657856-105657883 |
| CB sk 168 | chr3: 105657884-105657911 |
| CB sk 169 | chr3: 105657893-105657920 |
| CB sk 170 | chr3: 105657901-105657928 |
| CB sk 171 | chr3: 105657914-105657941 |
| CB sk 172 | chr3: 105657915-105657942 |
| CB sk 173 | chr3: 105657926-105657953 |
| CB sk 174 | chr3: 105657927-105657954 |
| CB sk 175 | chr3: 105657957-105657984 |
| CB sk 176 | chr3: 105657970-105657997 |
| CB sk 177 | chr3: 105658004-105658031 |
| CB sk 178 | chr3: 105658005-105658032 |
| CB sk 179 | chr3: 105658011-105658038 |
| CB sk 180 | chr3: 105658040-105658067 |
| CB sk 181 | chr3: 105658045-105658072 |
| CB sk 182 | chr3: 105658055-105658082 |
| CB sk 183 | chr3: 105658056-105658083 |
| CB sk 184 | chr3: 105658058-105658085 |
| CB sk 185 | chr3: 105658059-105658086 |
| CB sk 186 | chr3: 105658060-105658087 |
| CB sk 187 | chr3: 105658089-105658116 |
| CB sk 188 | chr3: 105658140-105658167 |
| CB sk 189 | chr3: 105658171-105658198 |
| CB sk 190 | chr3: 105658172-105658199 |
| CB sk 191 | chr3: 105658192-105658219 |
| CB sk 192 | chr3: 105658193-105658220 |
| CB sk 193 | chr3: 105658194-105658221 |
| CB sk 194 | chr3: 105658196-105658223 |
| CB sk 195 | chr3: 105658204-105658231 |
| CB sk 196 | chr3: 105658227-105658254 |
| CB sk 197 | chr3: 105658228-105658255 |
| CB sk 198 | chr3: 105658261-105658288 |
| CB sk 199 | chr3: 105658266-105658293 |
| CB sk 200 | chr3: 105658280-105658307 |
| CB sk 201 | chr3: 105658281-105658308 |
| CB sk 202 | chr3: 105658282-105658309 |
| CB sk 203 | chr3: 105658302-105658329 |
| CB sk 204 | chr3: 105658328-105658355 |
| CB sk 205 | chr3: 105658335-105658362 |
| CB sk 206 | chr3: 105658336-105658363 |
| CB sk 207 | chr3: 105658359-105658386 |
| CB sk 208 | chr3: 105658434-105658461 |
| CB sk 209 | chr3: 105658438-105658465 |
| CB sk 210 | chr3: 105658444-105658471 |
| CB sk 211 | chr3: 105658450-105658477 |
| CB sk 212 | chr3: 105658451-105658478 |
| CB sk 213 | chr3: 105658456-105658483 |
| CB sk 214 | chr3: 105658461-105658488 |
| CB sk 215 | chr3: 105658462-105658489 |
| CB sk 216 | chr3: 105658463-105658490 |
| CB sk 217 | chr3: 105658467-105658494 |
| CB sk 218 | chr3: 105658473-105658500 |
| CB sk 219 | chr3: 105658502-105658529 |
| CB sk 220 | chr3: 105658507-105658534 |
| CB sk 221 | chr3: 105658523-105658550 |
| CB sk 222 | chr3: 105658526-105658553 |
| CB sk 223 | chr3: 105658527-105658554 |
| CB sk 224 | chr3: 105658561-105658588 |
| CB sk 225 | chr3: 105658562-105658589 |
| CB sk 226 | chr3: 105658570-105658597 |
| CB sk 227 | chr3: 105658575-105658602 |
| CB sk 228 | chr3: 105658584-105658611 |
| CB sk 229 | chr3: 105658622-105658649 |
| CB sk 230 | chr3: 105658655-105658682 |
| CB sk 231 | chr3: 105658666-105658693 |
| CB sk 232 | chr3: 105658671-105658698 |
| CB sk 233 | chr3: 105658685-105658712 |
| CB sk 234 | chr3: 105658686-105658713 |
| CB sk 235 | chr3: 105658740-105658767 |
| CB sk 236 | chr3: 105658749-105658776 |
| CB sk 237 | chr3: 105658750-105658777 |
| CB sk 238 | chr3: 105658755-105658782 |
| CB sk 239 | chr3: 105658786-105658813 |
| CB sk 240 | chr3: 105658790-105658817 |
| CB sk 241 | chr3: 105658802-105658829 |
| CB sk 242 | chr3: 105658821-105658848 |
| CB sk 243 | chr3: 105658839-105658866 |
| CB sk 244 | chr3: 105658840-105658867 |
| CB sk 245 | chr3: 105658842-105658869 |
| CB sk 246 | chr3: 105658845-105658872 |
| CB sk 247 | chr3: 105658893-105658920 |
| CB sk 248 | chr3: 105658898-105658925 |
| CB sk 249 | chr3: 105658914-105658941 |
| CB sk 250 | chr3: 105658924-105658951 |
| CB sk 251 | chr3: 105658939-105658966 |
| CB sk 252 | chr3: 105658943-105658970 |
| CB sk 253 | chr3: 105658960-105658987 |
| CB sk 254 | chr3: 105658961-105658988 |
| CB sk 255 | chr3: 105658962-105658989 |
| CB sk 256 | chr3: 105658969-105658996 |
| CB sk 257 | chr3: 105658972-105658999 |
| CB sk 258 | chr3: 105658975-105659002 |
| CB sk 259 | chr3: 105658976-105659003 |
| CB sk 260 | chr3: 105658980-105659007 |
| CB sk 261 | chr3: 105658991-105659018 |
| CB sk 262 | chr3: 105658994-105659021 |
| CB sk 263 | chr3: 105659003-105659030 |
| CB sk 264 | chr3: 105659004-105659031 |
| CB sk 265 | chr3: 105659024-105659051 |
| CB sk 266 | chr3: 105659025-105659052 |
| CB sk 267 | chr3: 105659027-105659054 |
| CB sk 268 | chr3: 105659037-105659064 |
| CB sk 269 | chr3: 105659058-105659085 |
| CB sk 270 | chr3: 105659074-105659101 |
| CB sk 271 | chr3: 105659091-105659118 |
| CB sk 272 | chr3: 105659092-105659119 |
| CB sk 273 | chr3: 105659097-105659124 |
| CB sk 274 | chr3: 105659098-105659125 |
| CB sk 275 | chr3: 105659119-105659146 |
| CB sk 276 | chr3: 105659126-105659153 |
| CB sk 277 | chr3: 105659127-105659154 |
| CB sk 278 | chr3: 105659128-105659155 |
| CB sk 279 | chr3: 105659131-105659158 |
| CB sk 280 | chr3: 105659137-105659164 |
| CB sk 281 | chr3: 105659138-105659165 |
| CB sk 282 | chr3: 105659140-105659167 |
| CB sk 283 | chr3: 105659147-105659174 |
| CB sk 284 | chr3: 105659148-105659175 |
| CB sk 285 | chr3: 105659149-105659176 |
| CB sk 286 | chr3: 105659164-105659191 |
| CB sk 287 | chr3: 105659170-105659197 |
| CB sk 288 | chr3: 105659176-105659203 |
| CB sk 289 | chr3: 105659177-105659204 |
| CB sk 290 | chr3: 105659178-105659205 |
| CB sk 291 | chr3: 105659179-105659206 |
| CB sk 292 | chr3: 105659183-105659210 |
| CB sk 293 | chr3: 105659184-105659211 |
| CB sk 294 | chr3: 105659188-105659215 |
| CB sk 295 | chr3: 105659218-105659245 |
| CB sk 296 | chr3: 105659226-105659253 |
| CB sk 297 | chr3: 105670218-105670245 |
| CB sk 298 | chr3: 105670224-105670251 |
| CB sk 299 | chr3: 105670232-105670259 |
| CB sk 300 | chr3: 105670260-105670287 |
| CB sk 301 | chr3: 105670269-105670296 |
| CB sk 302 | chr3: 105670284-105670311 |
| CB sk 303 | chr3: 105670287-105670314 |
| CB sk 304 | chr3: 105670292-105670319 |
| CB sk 305 | chr3: 105670293-105670320 |
| CB sk 306 | chr3: 105670300-105670327 |
| CB sk 307 | chr3: 105670322-105670349 |
| CB sk 308 | chr3: 105670323-105670350 |
| CB sk 309 | chr3: 105670328-105670355 |
| CB sk 310 | chr3: 105671001-105671028 |
| CB sk 311 | chr3: 105671014-105671041 |
| CB sk 312 | chr3: 105671015-105671042 |
| CB sk 313 | chr3: 105671016-105671043 |
| CB sk 314 | chr3: 105671020-105671047 |
| CB sk 315 | chr3: 105671023-105671050 |
| CB sk 316 | chr3: 105671054-105671081 |
| CB sk 317 | chr3: 105671063-105671090 |
| CB sk 318 | chr3: 105671064-105671091 |
| CB sk 319 | chr3: 105671124-105671151 |
| CB sk 320 | chr3: 105671136-105671163 |
| CB sk 321 | chr3: 105671143-105671170 |
| CB sk 322 | chr3: 105671144-105671171 |
| CB sk 323 | chr3: 105671148-105671175 |
| CB sk 324 | chr3: 105671149-105671176 |
| CB sk 325 | chr3: 105671200-105671227 |
| CB sk 326 | chr3: 105671201-105671228 |
| CB sk 327 | chr3: 105671212-105671239 |
| CB sk 328 | chr3: 105671234-105671261 |
| CB sk 329 | chr3: 105671251-105671278 |
| CB sk 330 | chr3: 105671268-105671295 |
| CB sk 331 | chr3: 105671269-105671296 |
| CB sk 332 | chr3: 105671272-105671299 |
| CB sk 333 | chr3: 105671281-105671308 |
| CB sk 334 | chr3: 105671291-105671318 |
| CB sk 335 | chr3: 105671322-105671349 |
| CB sk 336 | chr3: 105671327-105671354 |
| CB sk 337 | chr3: 105671328-105671355 |
| CB sk 338 | chr3: 105671332-105671359 |
| CB sk 339 | chr3: 105671336-105671363 |
| CB sk 340 | chr3: 105671337-105671364 |
| CB sk 341 | chr3: 105671372-105671399 |
| CB sk 342 | chr3: 105671396-105671423 |
| CB sk 343 | chr3: 105671399-105671426 |
| CB sk 344 | chr3: 105671405-105671432 |
| CB sk 345 | chr3: 105671417-105671444 |
| CB sk 346 | chr3: 105671467-105671494 |
| CB sk 347 | chr3: 105671479-105671506 |
| CB sk 348 | chr3: 105671521-105671548 |
| CB sk 349 | chr3: 105671566-105671593 |
| CB sk 350 | chr3: 105671567-105671594 |
| CB sk 351 | chr3: 105671593-105671620 |
| CB sk 352 | chr3: 105671598-105671625 |
| CB sk 353 | chr3: 105671599-105671626 |
| CB sk 354 | chr3: 105671624-105671651 |
| CB sk 355 | chr3: 105671662-105671689 |
| CB sk 356 | chr3: 105671673-105671700 |
| CB sk 357 | chr3: 105671677-105671704 |
| CB sk 358 | chr3: 105671709-105671736 |
| CB sk 359 | chr3: 105671713-105671740 |
| CB sk 360 | chr3: 105671727-105671754 |
| CB sk 361 | chr3: 105671740-105671767 |
| CB sk 362 | chr3: 105671753-105671780 |
| CB sk 363 | chr3: 105671760-105671787 |
| CB sk 364 | chr3: 105671836-105671863 |
| CB sk 365 | chr3: 105671839-105671866 |
| CB sk 366 | chr3: 105671868-105671895 |
| CB sk 367 | chr3: 105671874-105671901 |
| CB sk 368 | chr3: 105671878-105671905 |
| CB sk 369 | chr3: 105671885-105671912 |
| CB sk 370 | chr3: 105671919-105671946 |
| CB sk 371 | chr3: 105671939-105671966 |
| CB sk 372 | chr3: 105671951-105671978 |
| CB sk 373 | chr3: 105671960-105671987 |
| CB sk 374 | chr3: 105672005-105672032 |
| CB sk 375 | chr3: 105672006-105672033 |
| CB sk 376 | chr3: 105672020-105672047 |
| CB sk 377 | chr3: 105672065-105672092 |
| CB sk 378 | chr3: 105672067-105672094 |
| CB sk 379 | chr3: 105672068-105672095 |
| CB sk 380 | chr3: 105672069-105672096 |
| CB sk 381 | chr3: 105672110-105672137 |
| CB sk 382 | chr3: 105672111-105672138 |
| CB sk 383 | chr3: 105672122-105672149 |
| CB sk 384 | chr3: 105672170-105672197 |
| CB sk 385 | chr3: 105672188-105672215 |
| CB sk 386 | chr3: 105672229-105672256 |
| CB sk 387 | chr3: 105672252-105672279 |
| CB sk 388 | chr3: 105672267-105672294 |
| CB sk 389 | chr3: 105672270-105672297 |
| CB sk 390 | chr3: 105672319-105672346 |
| CB sk 391 | chr3: 105672336-105672363 |
| CB sk 392 | chr3: 105672388-105672415 |
| CB sk 393 | chr3: 105672389-105672416 |
| CB sk 394 | chr3: 105672397-105672424 |
| CB sk 395 | chr3: 105672398-105672425 |
| CB sk 396 | chr3: 105672409-105672436 |
| CB sk 397 | chr3: 105672424-105672451 |
| CB sk 398 | chr3: 105672435-105672462 |
| CB sk 399 | chr3: 105672444-105672471 |
| CB sk 400 | chr3: 105672445-105672472 |
| CB sk 401 | chr3: 105675740-105675767 |
| CB sk 402 | chr3: 105675753-105675780 |
| CB sk 403 | chr3: 105675754-105675781 |
| CB sk 404 | chr3: 105675755-105675782 |
| CB sk 405 | chr3: 105675756-105675783 |
| CB sk 406 | chr3: 105675759-105675786 |
| CB sk 407 | chr3: 105675762-105675789 |
| CB sk 408 | chr3: 105675766-105675793 |
| CB sk 409 | chr3: 105675767-105675794 |
| CB sk 410 | chr3: 105675768-105675795 |
| CB sk 411 | chr3: 105675785-105675812 |
| CB sk 412 | chr3: 105675788-105675815 |
| CB sk 413 | chr3: 105675794-105675821 |
| CB sk 414 | chr3: 105675807-105675834 |
| CB sk 415 | chr3: 105675834-105675861 |
| CB sk 416 | chr3: 105675835-105675862 |
| CB sk 417 | chr3: 105675843-105675870 |
| CB sk 418 | chr3: 105675853-105675880 |
| CB sk 419 | chr3: 105675857-105675884 |
| CB sk 420 | chr3: 105675876-105675903 |
| CB sk 421 | chr3: 105675877-105675904 |
| CB sk 422 | chr3: 105678410-105678437 |
| CB sk 423 | chr3: 105678422-105678449 |
| CB sk 424 | chr3: 105678423-105678450 |
| CB sk 425 | chr3: 105678426-105678453 |
| CB sk 426 | chr3: 105678430-105678457 |
| CB sk 427 | chr3: 105678436-105678463 |
| CB sk 428 | chr3: 105678440-105678467 |
| CB sk 429 | chr3: 105678444-105678471 |
| CB sk 430 | chr3: 105678451-105678478 |
| CB sk 431 | chr3: 105678452-105678479 |
| CB sk 432 | chr3: 105678457-105678484 |
| CB sk 433 | chr3: 105678458-105678485 |
| CB sk 434 | chr3: 105678461-105678488 |
| CB sk 435 | chr3: 105678468-105678495 |
| CB sk 436 | chr3: 105678481-105678508 |
| CB sk 437 | chr3: 105678494-105678521 |
| CB sk 438 | chr3: 105678497-105678524 |
| CB sk 439 | chr3: 105678500-105678527 |
| CB sk 440 | chr3: 105678501-105678528 |
| CB sk 441 | chr3: 105678502-105678529 |
| CB sk 442 | chr3: 105678503-105678530 |
| CB sk 443 | chr3: 105678506-105678533 |
| CB sk 444 | chr3: 105678509-105678536 |
| CB sk 445 | chr3: 105678510-105678537 |
| CB sk 446 | chr3: 105678513-105678540 |
| CB sk 447 | chr3: 105678518-105678545 |
| CB sk 448 | chr3: 105678521-105678548 |
| CB sk 449 | chr3: 105678522-105678549 |
| CB sk 450 | chr3: 105678525-105678552 |
| CB sk 451 | chr3: 105678526-105678553 |
| CB sk 452 | chr3: 105678561-105678588 |
| CB sk 453 | chr3: 105678571-105678598 |
| CB sk 454 | chr3: 105681458-105681485 |
| CB sk 455 | chr3: 105681461-105681488 |
| CB sk 456 | chr3: 105681462-105681489 |
| CB sk 457 | chr3: 105681478-105681505 |
| CB sk 458 | chr3: 105681484-105681511 |
| CB sk 459 | chr3: 105681485-105681512 |
| CB sk 460 | chr3: 105681515-105681542 |
| CB sk 461 | chr3: 105681516-105681543 |
| CB sk 462 | chr3: 105681530-105681557 |
| CB sk 463 | chr3: 105681532-105681559 |
| CB sk 464 | chr3: 105681533-105681560 |
| CB sk 465 | chr3: 105681538-105681565 |
| CB sk 466 | chr3: 105681542-105681569 |
| CB sk 467 | chr3: 105681545-105681572 |
| CB sk 468 | chr3: 105681548-105681575 |
| CB sk 469 | chr3: 105681549-105681576 |
| CB sk 470 | chr3: 105681551-105681578 |
| CB sk 471 | chr3: 105681556-105681583 |
| CB sk 472 | chr3: 105681557-105681584 |
| CB sk 473 | chr3: 105681561-105681588 |
| CB sk 474 | chr3: 105681565-105681592 |
| CB sk 475 | chr3: 105681590-105681617 |
| CB sk 476 | chr3: 105681610-105681637 |
| CB sk 477 | chr3: 105681721-105681748 |
| CB sk 478 | chr3: 105681722-105681749 |
| CB sk 479 | chr3: 105681723-105681750 |
| CB sk 480 | chr3: 105681724-105681751 |
| CB sk 481 | chr3: 105681748-105681775 |
| CB sk 482 | chr3: 105681777-105681804 |
| CB sk 483 | chr3: 105681786-105681813 |
| CB sk 484 | chr3: 105681798-105681825 |
| CB sk 485 | chr3: 105681804-105681831 |
| CB sk 486 | chr3: 105681818-105681845 |
| CB sk 487 | chr3: 105685300-105685327 |
| CB sk 488 | chr3: 105685303-105685330 |
| CB sk 489 | chr3: 105685307-105685334 |
| CB sk 490 | chr3: 105685308-105685335 |
| CB sk 491 | chr3: 105685319-105685346 |
| CB sk 492 | chr3: 105685327-105685354 |
| CB sk 493 | chr3: 105685340-105685367 |
| CB sk 494 | chr3: 105685341-105685368 |
| CB sk 495 | chr3: 105685348-105685375 |
| CB sk 496 | chr3: 105685349-105685376 |
| CB sk 497 | chr3: 105685352-105685379 |
| CB sk 498 | chr3: 105685353-105685380 |
| CB sk 499 | chr3: 105685360-105685387 |
| CB sk 500 | chr3: 105685393-105685420 |
| CB sk 501 | chr3: 105685394-105685421 |
| CB sk 502 | chr3: 105685411-105685438 |
| CB sk 503 | chr3: 105685429-105685456 |
| CB sk 504 | chr3: 105685447-105685474 |
| CB sk 505 | chr3: 105685448-105685475 |
| CB sk 506 | chr3: 105685449-105685476 |
| CB sk 507 | chr3: 105685458-105685485 |
| CB sk 508 | chr3: 105685466-105685493 |
| CB sk 509 | chr3: 105693474-105693501 |
| CB sk 510 | chr3: 105693477-105693504 |
| CB sk 511 | chr3: 105693478-105693505 |
| CB sk 512 | chr3: 105693481-105693508 |
| CB sk 513 | chr3: 105693484-105693511 |
| CB sk 514 | chr3: 105693485-105693512 |
| CB sk 515 | chr3: 105693488-105693515 |
| CB sk 516 | chr3: 105693495-105693522 |
| CB sk 517 | chr3: 105693498-105693525 |
| CB sk 518 | chr3: 105693501-105693528 |
| CB sk 519 | chr3: 105693504-105693531 |
| CB sk 520 | chr3: 105693544-105693571 |
| CB sk 521 | chr3: 105693554-105693581 |
| CB sk 522 | chr3: 105693566-105693593 |
| CB sk 523 | chr3: 105693575-105693602 |
| CB sk 524 | chr3: 105693588-105693615 |
| CB sk 525 | chr3: 105702084-105702111 |
| CB sk 526 | chr3: 105702093-105702120 |
| CB sk 527 | chr3: 105702094-105702121 |
| CB sk 528 | chr3: 105702101-105702128 |
| CB sk 529 | chr3: 105702120-105702147 |
| CB sk 530 | chr3: 105702121-105702148 |
| CB sk 531 | chr3: 105702133-105702160 |
| CB sk 532 | chr3: 105702155-105702182 |
| CB sk 533 | chr3: 105702156-105702183 |
| CB sk 534 | chr3: 105702169-105702196 |
| CB sk 535 | chr3: 105702173-105702200 |
| CB sk 536 | chr3: 105702177-105702204 |
| CB sk 537 | chr3: 105702183-105702210 |
| CB sk 538 | chr3: 105702199-105702226 |
| CB sk 539 | chr3: 105702200-105702227 |
| CB sk 540 | chr3: 105702215-105702242 |
| CB sk 541 | chr3: 105702216-105702243 |
| CB sk 542 | chr3: 105702219-105702246 |
| CB sk 543 | chr3: 105702220-105702247 |
| CB sk 544 | chr3: 105702221-105702248 |
| CB sk 545 | chr3: 105702236-105702263 |
| CB sk 546 | chr3: 105702237-105702264 |
| CB sk 547 | chr3: 105702243-105702270 |
| CB sk 548 | chr3: 105702244-105702271 |
| CB sk 549 | chr3: 105702253-105702280 |
| CB sk 550 | chr3: 105702254-105702281 |
| CB sk 551 | chr3: 105702261-105702288 |
| CB sk 552 | chr3: 105702264-105702291 |
| CB sk 553 | chr3: 105702265-105702292 |
| CB sk 554 | chr3: 105702267-105702294 |
| CB sk 555 | chr3: 105702270-105702297 |
| CB sk 556 | chr3: 105702271-105702298 |
| CB sk 557 | chr3: 105702274-105702301 |
| CB sk 558 | chr3: 105702278-105702305 |
| CB sk 559 | chr3: 105702282-105702309 |
| CB sk 560 | chr3: 105702301-105702328 |
| CB sk 561 | chr3: 105702318-105702345 |
| CB sk 562 | chr3: 105702327-105702354 |
| CB sk 563 | chr3: 105702330-105702357 |
| CB sk 564 | chr3: 105702331-105702358 |
| CB sk 565 | chr3: 105702336-105702363 |
| CB sk 566 | chr3: 105702339-105702366 |
| CB sk 567 | chr3: 105702342-105702369 |
| CB sk 568 | chr3: 105702351-105702378 |
| CB sk 569 | chr3: 105702354-105702381 |
| CB sk 570 | chr3: 105702357-105702384 |
| CB sk 571 | chr3: 105702360-105702387 |
| CB sk 572 | chr3: 105702363-105702390 |
| CB sk 573 | chr3: 105702366-105702393 |
| CB sk 574 | chr3: 105702377-105702404 |
| CB sk 575 | chr3: 105702378-105702405 |
| CB sk 576 | chr3: 105702381-105702408 |
| CB sk 577 | chr3: 105702384-105702411 |
| CB sk 578 | chr3: 105702387-105702414 |
| CB sk 579 | chr3: 105702393-105702420 |
| CB sk 580 | chr3: 105702394-105702421 |
| CB sk 581 | chr3: 105702399-105702426 |
| CB sk 582 | chr3: 105702426-105702453 |
| CB sk 583 | chr3: 105702444-105702471 |
| CB sk 584 | chr3: 105703966-105703993 |
| CB sk 585 | chr3: 105703978-105704005 |
| CB sk 586 | chr3: 105703979-105704006 |
| CB sk 587 | chr3: 105703987-105704014 |
| CB sk 588 | chr3: 105703989-105704016 |
| CB sk 589 | chr3: 105703990-105704017 |
| CB sk 590 | chr3: 105703998-105704025 |
| CB sk 591 | chr3: 105703999-105704026 |
| CB sk 592 | chr3: 105704010-105704037 |
| CB sk 593 | chr3: 105704024-105704051 |
| CB sk 594 | chr3: 105704029-105704056 |
| CB sk 595 | chr3: 105704031-105704058 |
| CB sk 596 | chr3: 105704032-105704059 |
| CB sk 597 | chr3: 105704037-105704064 |
| CB sk 598 | chr3: 105704038-105704065 |
| CB sk 599 | chr3: 105704041-105704068 |
| CB sk 600 | chr3: 105704045-105704072 |
| CB sk 601 | chr3: 105704047-105704074 |
| CB sk 602 | chr3: 105704056-105704083 |
| CB sk 603 | chr3: 105704057-105704084 |
| CB sk 604 | chr3: 105704063-105704090 |
| CB sk 605 | chr3: 105704068-105704095 |
| CB sk 606 | chr3: 105704069-105704096 |
| CB sk 607 | chr3: 105704074-105704101 |
| CB sk 608 | chr3: 105704080-105704107 |
| CB sk 609 | chr3: 105704093-105704120 |
| CB sk 610 | chr3: 105704094-105704121 |
| CB sk 611 | chr3: 105704099-105704126 |
| CB sk 612 | chr3: 105704100-105704127 |
| CB sk 613 | chr3: 105704101-105704128 |
| CB sk 614 | chr3: 105704106-105704133 |
| CB sk 615 | chr3: 105704113-105704140 |
| CB sk 616 | chr3: 105704125-105704152 |
| CB sk 617 | chr3: 105704136-105704163 |
| CB sk 618 | chr3: 105704162-105704189 |
| CB sk 619 | chr3: 105715186-105715213 |
| CB sk 620 | chr3: 105715199-105715226 |
| CB sk 621 | chr3: 105715200-105715227 |
| CB sk 622 | chr3: 105715209-105715236 |
| CB sk 623 | chr3: 105715226-105715253 |
| CB sk 624 | chr3: 105715248-105715275 |
| CB sk 625 | chr3: 105715249-105715276 |
| CB sk 626 | chr3: 105715250-105715277 |
| CB sk 627 | chr3: 105715267-105715294 |
| CB sk 628 | chr3: 105715268-105715295 |
| CB sk 629 | chr3: 105720026-105720053 |
| CB sk 630 | chr3: 105720028-105720055 |
| CB sk 631 | chr3: 105720029-105720056 |
| CB sk 632 | chr3: 105720046-105720073 |
| CB sk 633 | chr3: 105720054-105720081 |
| CB sk 634 | chr3: 105720061-105720088 |
| CB sk 635 | chr3: 105720065-105720092 |
| CB sk 636 | chr3: 105720126-105720153 |
| CB sk 637 | chr3: 105720129-105720156 |
| CB sk 638 | chr3: 105720168-105720195 |
| CB sk 639 | chr3: 105720169-105720196 |
| CB sk 640 | chr3: 105720184-105720211 |
| CB sk 641 | chr3: 105720202-105720229 |
| CB sk 642 | chr3: 105720203-105720230 |
| CB sk 643 | chr3: 105720204-105720231 |
| CB sk 644 | chr3: 105720234-105720261 |
| CB sk 645 | chr3: 105720235-105720262 |
| CB sk 646 | chr3: 105720240-105720267 |
| CB sk 647 | chr3: 105720244-105720271 |
| CB sk 648 | chr3: 105720246-105720273 |
| CB sk 649 | chr3: 105720250-105720277 |
| CB sk 650 | chr3: 105724025-105724052 |
| CB sk 651 | chr3: 105724056-105724083 |
| CB sk 652 | chr3: 105724065-105724092 |
| CB sk 653 | chr3: 105724100-105724127 |
| CB sk 654 | chr3: 105724104-105724131 |
| CB sk 655 | chr3: 105724134-105724161 |
| CB sk 656 | chr3: 105724139-105724166 |
| CB sk 657 | chr3: 105724162-105724189 |
| CB sk 658 | chr3: 105724165-105724192 |
| CB sk 659 | chr3: 105724166-105724193 |
| CB sk 660 | chr3: 105724188-105724215 |
| CB sk 661 | chr3: 105733988-105734015 |
| CB sk 662 | chr3: 105733997-105734024 |
| CB sk 663 | chr3: 105734004-105734031 |
| CB sk 664 | chr3: 105734008-105734035 |
| CB sk 665 | chr3: 105734012-105734039 |
| CB sk 666 | chr3: 105734017-105734044 |
| CB sk 667 | chr3: 105734026-105734053 |
| CB sk 668 | chr3: 105734045-105734072 |
| CB sk 669 | chr3: 105734046-105734073 |
| CB sk 670 | chr3: 105734082-105734109 |
| CB sk 671 | chr3: 105734112-105734139 |
| CB sk 672 | chr3: 105734113-105734140 |
| CB sk 673 | chr3: 105734117-105734144 |
| CB sk 674 | chr3: 105734124-105734151 |
| CB sk 675 | chr3: 105734125-105734152 |
| CB sk 676 | chr3: 105734126-105734153 |
| CB sk 677 | chr3: 105734129-105734156 |
| CB sk 678 | chr3: 105734132-105734159 |
| CB sk 679 | chr3: 105734133-105734160 |
| CB sk 680 | chr3: 105734140-105734167 |
| CB sk 681 | chr3: 105737162-105737189 |
| CB sk 682 | chr3: 105737165-105737192 |
| CB sk 683 | chr3: 105737170-105737197 |
| CB sk 684 | chr3: 105737176-105737203 |
| CB sk 685 | chr3: 105737200-105737227 |
| CB sk 686 | chr3: 105737214-105737241 |
| CB sk 687 | chr3: 105737221-105737248 |
| CB sk 688 | chr3: 105737237-105737264 |
| CB sk 689 | chr3: 105737240-105737267 |
| CB sk 690 | chr3: 105737241-105737268 |
| CB sk 691 | chr3: 105740470-105740497 |
| CB sk 692 | chr3: 105740477-105740504 |
| CB sk 693 | chr3: 105740493-105740520 |
| CB sk 694 | chr3: 105740494-105740521 |
| CB sk 695 | chr3: 105740497-105740524 |
| CB sk 696 | chr3: 105740501-105740528 |
| CB sk 697 | chr3: 105740502-105740529 |
| CB sk 698 | chr3: 105740506-105740533 |
| CB sk 699 | chr3: 105740507-105740534 |
| CB sk 700 | chr3: 105740509-105740536 |
| CB sk 701 | chr3: 105740519-105740546 |
| CB sk 702 | chr3: 105740524-105740551 |
| CB sk 703 | chr3: 105740563-105740590 |
| CB sk 704 | chr3: 105740565-105740592 |
| CB sk 705 | chr3: 105740566-105740593 |
| CB sk 706 | chr3: 105740570-105740597 |
| CB sk 707 | chr3: 105740571-105740598 |
| CB sk 708 | chr3: 105740572-105740599 |
| CB sk 709 | chr3: 105740584-105740611 |
| CB sk 710 | chr3: 105740591-105740618 |
| CB sk 711 | chr3: 105740592-105740619 |
| CB sk 712 | chr3: 105740595-105740622 |
| CB sk 713 | chr3: 105740599-105740626 |
| CB sk 714 | chr3: 105740600-105740627 |
| CB sk 715 | chr3: 105740619-105740646 |
| CB sk 716 | chr3: 105745896-105745923 |
| CB sk 717 | chr3: 105745897-105745924 |
| CB sk 718 | chr3: 105745902-105745929 |
| CB sk 719 | chr3: 105745916-105745943 |
| CB sk 720 | chr3: 105745920-105745947 |
| CB sk 721 | chr3: 105745963-105745990 |
| CB sk 722 | chr3: 105745978-105746005 |
| CB sk 723 | chr3: 105745986-105746013 |
| CB sk 724 | chr3: 105746011-105746038 |
| CB sk 725 | chr3: 105746012-105746039 |
| CB sk 726 | chr3: 105746018-105746045 |
| CB sk 727 | chr3: 105746031-105746058 |
| CB sk 728 | chr3: 105746032-105746059 |
| CB sk 729 | chr3: 105746033-105746060 |
| CB sk 730 | chr3: 105749602-105749629 |
| CB sk 731 | chr3: 105749615-105749642 |
| CB sk 732 | chr3: 105749624-105749651 |
| CB sk 733 | chr3: 105749626-105749653 |
| CB sk 734 | chr3: 105749657-105749684 |
| CB sk 735 | chr3: 105749674-105749701 |
| CB sk 736 | chr3: 105749751-105749778 |
| CB sk 737 | chr3: 105749756-105749783 |
| CB sk 738 | chr3: 105749765-105749792 |
| CB sk 739 | chr3: 105749786-105749813 |
| CB sk 740 | chr3: 105751461-105751488 |
| CB sk 741 | chr3: 105751471-105751498 |
| CB sk 742 | chr3: 105751528-105751555 |
| CB sk 743 | chr3: 105751542-105751569 |
| CB sk 744 | chr3: 105751543-105751570 |
| CB sk 745 | chr3: 105751546-105751573 |
| CB sk 746 | chr3: 105751551-105751578 |
| CB sk 747 | chr3: 105751556-105751583 |
| CB sk 748 | chr3: 105751558-105751585 |
| CB sk 749 | chr3: 105751575-105751602 |
| CB sk 750 | chr3: 105751581-105751608 |
| CB sk 751 | chr3: 105751601-105751628 |
| CB sk 752 | chr3: 105751603-105751630 |
| CB sk 753 | chr3: 105751604-105751631 |
| CB sk 754 | chr3: 105751613-105751640 |
| CB sk 755 | chr3: 105751614-105751641 |
| CB sk 756 | chr3: 105754319-105754346 |
| CB sk 757 | chr3: 105754320-105754347 |
| CB sk 758 | chr3: 105754342-105754369 |
| CB sk 759 | chr3: 105754345-105754372 |
| CB sk 760 | chr3: 105754346-105754373 |
| CB sk 761 | chr3: 105754349-105754376 |
| CB sk 762 | chr3: 105754386-105754413 |
| CB sk 763 | chr3: 105754392-105754419 |
| CB sk 764 | chr3: 105754433-105754460 |
| CB sk 765 | chr3: 105754434-105754461 |
| CB sk 766 | chr3: 105754440-105754467 |
| CB sk 767 | chr3: 105754451-105754478 |
| CB sk 768 | chr3: 105754452-105754479 |
| CB sk 769 | chr3: 105754464-105754491 |
| CB sk 770 | chr3: 105754465-105754492 |
| CB sk 771 | chr3: 105754474-105754501 |
| CB sk 772 | chr3: 105776402-105776429 |
| CB sk 773 | chr3: 105776416-105776443 |
| CB sk 774 | chr3: 105776437-105776464 |
| CB sk 775 | chr3: 105776450-105776477 |
| CB sk 776 | chr3: 105776451-105776478 |
| CB sk 777 | chr3: 105776459-105776486 |
| CB sk 778 | chr3: 105776460-105776487 |
| CB sk 779 | chr3: 105776471-105776498 |
| CB sk 780 | chr3: 105776494-105776521 |
| CB sk 781 | chr3: 105776495-105776522 |
| CB sk 782 | chr3: 105776499-105776526 |
| CB sk 783 | chr3: 105776522-105776549 |
| CB sk 784 | chr3: 105776529-105776556 |
| CB sk 785 | chr3: 105776530-105776557 |
| CB sk 786 | chr3: 105824098-105824125 |
| CB sk 787 | chr3: 105824106-105824133 |
| CB sk 788 | chr3: 105824107-105824134 |
| CB sk 789 | chr3: 105824135-105824162 |
| CB sk 790 | chr3: 105824138-105824165 |
| CB sk 791 | chr3: 105824142-105824169 |
| CB sk 792 | chr3: 105824152-105824179 |
| CB sk 793 | chr3: 105824153-105824180 |
| CB sk 794 | chr3: 105824154-105824181 |
| CB sk 795 | chr3: 105824161-105824188 |
| CB sk 796 | chr3: 105824183-105824210 |
| CB sk 797 | chr3: 105824186-105824213 |
| CB sk 798 | chr3: 105824194-105824221 |
| CB sk 799 | chr3: 105824195-105824222 |
| CB sk 800 | chr3: 105824205-105824232 |
| CB sk 801 | chr3: 105824206-105824233 |
| CB sk 802 | chr3: 105824207-105824234 |
| CB sk 803 | chr3: 105824210-105824237 |
| CB sk 804 | chr3: 105824211-105824238 |
| CB sk 805 | chr3: 105824212-105824239 |
| CB sk 806 | chr3: 105824225-105824252 |
| CB sk 807 | chr3: 105824241-105824268 |
| CB sk 808 | chr3: 105839418-105839445 |
| CB sk 809 | chr3: 105839422-105839449 |
| CB sk 810 | chr3: 105839426-105839453 |
| CB sk 811 | chr3: 105839434-105839461 |
| CB sk 812 | chr3: 105839447-105839474 |
| CB sk 813 | chr3: 105839457-105839484 |
| CB sk 814 | chr3: 105839458-105839485 |
| CB sk 815 | chr3: 105853387-105853414 |
| CB sk 816 | chr3: 105853445-105853472 |
| CB sk 817 | chr3: 105853521-105853548 |
| CB sk 818 | chr3: 105853571-105853598 |
| CB sk 819 | chr3: 105853618-105853645 |
| CB sk 820 | chr3: 105853619-105853646 |
| CB sk 821 | chr3: 105853626-105853653 |
| CB sk 822 | chr3: 105853664-105853691 |
| CB sk 823 | chr3: 105867417-105867444 |
| CB sk 824 | chr3: 105867418-105867445 |
| CB sk 825 | chr3: 105867477-105867504 |
| CB sk 826 | chr3: 105867487-105867514 |
| CB sk 827 | chr3: 105867500-105867527 |
| CB sk 828 | chr3: 105867501-105867528 |
| CB sk 829 | chr3: 105867534-105867561 |
| CB sk 830 | chr3: 105867537-105867564 |
| CB sk 831 | chr3: 105867543-105867570 |
| CB sk 832 | chr3: 105867546-105867573 |
| CB sk 833 | chr3: 105867554-105867581 |
| CB sk 834 | chr3: 105867558-105867585 |
| CB sk 835 | chr3: 105867574-105867601 |
| CB sk 836 | chr3: 105868144-105868171 |
| CB sk 837 | chr3: 105868147-105868174 |
| CB sk 838 | chr3: 105868161-105868188 |
| CB sk 839 | chr3: 105868168-105868195 |
| CB sk 840 | chr3: 105868201-105868228 |
| CB sk 841 | chr3: 105868202-105868229 |
| CB sk 842 | chr3: 105868209-105868236 |
| CB sk 843 | chr3: 105868234-105868261 |
| CB sk 844 | chr3: 105868235-105868262 |
| CB sk 845 | chr3: 105868245-105868272 |
| CB sk 846 | chr3: 105868251-105868278 |
| CB sk 847 | chr3: 105868256-105868283 |
| CB sk 848 | chr3: 105868259-105868286 |
| CB sk 849 | chr3: 105868273-105868300 |
| CB sk 850 | chr3: 105868274-105868301 |
| CB sk 851 | chr3: 105868304-105868331 |
| CB sk 852 | chr3: 105868309-105868336 |
| CB sk 853 | chr3: 105868313-105868340 |
| CB sk 854 | chr3: 105868315-105868342 |
| CB sk 855 | chr3: 105868316-105868343 |
| CB sk 856 | chr3: 105868322-105868349 |
| CB sk 857 | chr3: 105868323-105868350 |
| CB sk 858 | chr3: 105868339-105868366 |
| CB sk 859 | chr3: 105868344-105868371 |
| CB sk 860 | chr3: 105868350-105868377 |
| CB sk 861 | chr3: 105868351-105868378 |
| CB sk 862 | chr3: 105868352-105868379 |
| CB sk 863 | chr3: 105868356-105868383 |
| CB sk 864 | chr3: 105868357-105868384 |
| CB sk 865 | chr3: 105868358-105868385 |
| CB sk 866 | chr3: 105868359-105868386 |
| CB sk 867 | chr3: 105868367-105868394 |
| CB sk 868 | chr3: 105868368-105868395 |
| CB sk 869 | chr3: 105868369-105868396 |
| CB sk 870 | chr3: 105868372-105868399 |
| CB sk 871 | chr3: 105868373-105868400 |
| CB sk 872 | chr3: 105868374-105868401 |
| CB sk 873 | chr3: 105868375-105868402 |
| CB sk 874 | chr3: 105868378-105868405 |
| CB sk 875 | chr3: 105868379-105868406 |
| CB sk 876 | chr3: 105868380-105868407 |
| CB sk 877 | chr3: 105868507-105868534 |
| CB sk 878 | chr3: 105868508-105868535 |
| CB sk 879 | chr3: 105868512-105868539 |
| CB sk 880 | chr3: 105868515-105868542 |
| CB sk 881 | chr3: 105868518-105868545 |
| CB sk 882 | chr3: 105868526-105868553 |
| CB sk 883 | chr3: 105868531-105868558 |
| CB sk 884 | chr3: 105868534-105868561 |
| CB sk 885 | chr3: 105868540-105868567 |
| CB sk 886 | chr3: 105868541-105868568 |
| CB sk 887 | chr3: 105868547-105868574 |
| CB sk 888 | chr3: 105868548-105868575 |
| CB sk 889 | chr3: 105868549-105868576 |
| CB sk 890 | chr3: 105868550-105868577 |
| CB sk 891 | chr3: 105868554-105868581 |
| CB sk 892 | chr3: 105868555-105868582 |
| CB sk 893 | chr3: 105868556-105868583 |
| CB sk 894 | chr3: 105868559-105868586 |
| CB sk 895 | chr3: 105868711-105868738 |
| CB sk 896 | chr3: 105868712-105868739 |
| CB sk 897 | chr3: 105868713-105868740 |
| CB sk 898 | chr3: 105868715-105868742 |
| CB sk 899 | chr3: 105868720-105868747 |
| CB sk 900 | chr3: 105868721-105868748 |
| CB sk 901 | chr3: 105868722-105868749 |
| CB sk 902 | chr3: 105868726-105868753 |
| CB sk 903 | chr3: 105868727-105868754 |
| CB sk 904 | chr3: 105868735-105868762 |
| CB sk 905 | chr3: 105868745-105868772 |
| CB sk 906 | chr3: 105868749-105868776 |
| CB sk 907 | chr3: 105868750-105868777 |
| CB sk 908 | chr3: 105868755-105868782 |
| CB sk 909 | chr3: 105868779-105868806 |
| CB sk 910 | chr3: 105868780-105868807 |
| CB sk 911 | chr3: 105868785-105868812 |
| CB sk 912 | chr3: 105868786-105868813 |
| CB sk 913 | chr3: 105868787-105868814 |
| CB sk 914 | chr3: 105868795-105868822 |
| CB sk 915 | chr3: 105868799-105868826 |
| CB sk 916 | chr3: 105868800-105868827 |
| CB sk 917 | chr3: 105868805-105868832 |
| CB sk 918 | chr3: 105868806-105868833 |
| CB sk 919 | chr3: 105868817-105868844 |
| CB sk 920 | chr3: 105868818-105868845 |
| CB sk 921 | chr3: 105868819-105868846 |
| CB sk 922 | chr3: 105868837-105868864 |
| CB sk 923 | chr3: 105868854-105868881 |
| CB sk 924 | chr3: 105868855-105868882 |
| CB sk 925 | chr3: 105868869-105868896 |
| CB sk 926 | chr3: 105868870-105868897 |
| CB sk 927 | chr3: 105868871-105868898 |
| CB sk 928 | chr3: 105868883-105868910 |
| CB sk 929 | chr3: 105868886-105868913 |
| CB sk 930 | chr3: 105868911-105868938 |
| CB sk 931 | chr3: 105868925-105868952 |
| CB sk 932 | chr3: 105868929-105868956 |
| CB sk 933 | chr3: 105868930-105868957 |
| CB sk 934 | chr3: 105868931-105868958 |
| CB sk 935 | chr3: 105868934-105868961 |
| CB sk 936 | chr3: 105868938-105868965 |
| CB sk 937 | chr3: 105868939-105868966 |
| CB sk 938 | chr3: 105868940-105868967 |
| CB sk 939 | chr3: 105868941-105868968 |
| CB sk 940 | chr3: 105868943-105868970 |
| CB sk 941 | chr3: 105868944-105868971 |
| CB sk 942 | chr3: 105868947-105868974 |
| CB sk 943 | chr3: 105868948-105868975 |
| CB sk 944 | chr3: 105868962-105868989 |
| CB sk 945 | chr3: 105868963-105868990 |
| CB sk 946 | chr3: 105868966-105868993 |
| CB sk 947 | chr3: 105868969-105868996 |
| CB sk 948 | chr3: 105868972-105868999 |
| CB sk 949 | chr3: 105868983-105869010 |
| CB sk 950 | chr3: 105869000-105869027 |
| CB sk 951 | chr3: 105869010-105869037 |
| CB sk 952 | chr3: 105869317-105869344 |
| CB sk 953 | chr3: 105869318-105869345 |
| CB sk 954 | chr3: 105869319-105869346 |
| CB sk 955 | chr3: 105869322-105869349 |
| CB sk 956 | chr3: 105869326-105869353 |
| CB sk 957 | chr3: 105869329-105869356 |
| CB sk 958 | chr3: 105869330-105869357 |
| CB sk 959 | chr3: 105869336-105869363 |
| CB sk 960 | chr3: 105869342-105869369 |
| CB sk 961 | chr3: 105869343-105869370 |
| CB sk 962 | chr3: 105869348-105869375 |
| CB sk 963 | chr3: 105869349-105869376 |
| CB sk 964 | chr3: 105869365-105869392 |
| CB sk 965 | chr3: 105869366-105869393 |
| CB sk 966 | chr3: 105869367-105869394 |
| CB sk 967 | chr3: 105869372-105869399 |
| CB sk 968 | chr3: 105869375-105869402 |
| CB sk 969 | chr3: 105869378-105869405 |
| CB sk 970 | chr3: 105869379-105869406 |
| CB sk 971 | chr3: 105869385-105869412 |
| CB sk 972 | chr3: 105869411-105869438 |
| CB sk 973 | chr3: 105869424-105869451 |
| CB sk 974 | chr3: 105869428-105869455 |
| CB sk 975 | chr3: 105869434-105869461 |
| CB sk 976 | chr3: 105869438-105869465 |
| CB sk 977 | chr3: 105869442-105869469 |
| CB sk 978 | chr3: 105869443-105869470 |
| CB sk 979 | chr3: 105869462-105869489 |
| CB sk 980 | chr3: 105869463-105869490 |
| CB sk 981 | chr3: 105869466-105869493 |
| CB sk 982 | chr3: 105869467-105869494 |
| CB sk 983 | chr3: 105869478-105869505 |
| CB sk 984 | chr3: 105869481-105869508 |
| CB sk 985 | chr3: 105869496-105869523 |
| CB sk 986 | chr3: 105869497-105869524 |
| CB sk 987 | chr3: 105869498-105869525 |
| CB sk 988 | chr3: 105869518-105869545 |
| CB sk 989 | chr3: 105869519-105869546 |
| CB sk 990 | chr3: 105869520-105869547 |
| CB sk 991 | chr3: 105869529-105869556 |
| CB sk 992 | chr3: 105869534-105869561 |
| CB sk 993 | chr3: 105869535-105869562 |
| CB sk 994 | chr3: 105869536-105869563 |
| CB sk 995 | chr3: 105869542-105869569 |
| CB sk 996 | chr3: 105869543-105869570 |
| CB sk 997 | chr3: 105869555-105869582 |
| CB sk 998 | chr3: 105869559-105869586 |
| CB sk 999 | chr3: 105869606-105869633 |
| CB sk 1000 | chr3: 105869622-105869649 |
| CB sk 1001 | chr3: 105869626-105869653 |
| CB sk 1002 | chr3: 105869627-105869654 |
| CB sk 1003 | chr3: 105869628-105869655 |
| CB sk 1004 | chr3: 105869669-105869696 |
| CB sk 1005 | chr3: 105869682-105869709 |
| CB sk 1006 | chr3: 105869683-105869710 |
| CB sk 1007 | chr3: 105869691-105869718 |
| CB sk 1008 | chr3: 105869695-105869722 |
| CB sk 1009 | chr3: 105869696-105869723 |
| CB sk 1010 | chr3: 105869716-105869743 |
| CB sk 1011 | chr3: 105869732-105869759 |
| CB sk 1012 | chr3: 105869748-105869775 |
| CB sk 1013 | chr3: 105869776-105869803 |
| CB sk 1014 | chr3: 105869799-105869826 |
| CB sk 1015 | chr3: 105869800-105869827 |
| CB sk 1016 | chr3: 105869816-105869843 |
| CB sk 1017 | chr3: 105869843-105869870 |
| CB sk 1018 | chr3: 105869850-105869877 |
| CB sk 1019 | chr3: 105869862-105869889 |
| CB sk 1020 | chr3: 105869865-105869892 |
| CB sk 1021 | chr3: 105869875-105869902 |
| CB sk 1022 | chr3: 105869888-105869915 |
| CB sk 1023 | chr3: 105869921-105869948 |
| CB sk 1024 | chr3: 105869940-105869967 |
| CB sk 1025 | chr3: 105869954-105869981 |
| CB sk 1026 | chr3: 105869968-105869995 |
| CB sk 1027 | chr3: 105869975-105870002 |
| CB sk 1028 | chr3: 105869978-105870005 |
| CB sk 1029 | chr3: 105869990-105870017 |
| CB sk 1030 | chr3: 105870001-105870028 |
| CB sk 1031 | chr3: 105870005-105870032 |
| CB sk 1032 | chr3: 105870006-105870033 |
| CB sk 1033 | chr3: 105870012-105870039 |
| CB sk 1034 | chr3: 105870026-105870053 |
| CB sk 1035 | chr3: 105870029-105870056 |
| CB sk 1036 | chr3: 105870044-105870071 |
| CB sk 1037 | chr3: 105870045-105870072 |
| CB sk 1038 | chr3: 105870070-105870097 |
| CB sk 1039 | chr3: 105870109-105870136 |
| CB sk 1040 | chr3: 105870113-105870140 |
| CB sk 1041 | chr3: 105870137-105870164 |
| CB sk 1042 | chr3: 105870138-105870165 |
| CB sk 1043 | chr3: 105870141-105870168 |
| CB sk 1044 | chr3: 105870153-105870180 |
| CB sk 1045 | chr3: 105870155-105870182 |
| CB sk 1046 | chr3: 105870193-105870220 |
| CB sk 1047 | chr3: 105870205-105870232 |
| CB sk 1048 | chr3: 105870236-105870263 |
| CB sk 1049 | chr3: 105870237-105870264 |
| CB sk 1050 | chr3: 105870305-105870332 |
| CB sk 1051 | chr3: 105870308-105870335 |
| CB sk 1052 | chr3: 105870313-105870340 |
| CB sk 1053 | chr3: 105870342-105870369 |
| CB sk 1054 | chr3: 105870364-105870391 |
| CB sk 1055 | chr3: 105870394-105870421 |
| CB sk 1056 | chr3: 105870401-105870428 |
| CB sk 1057 | chr3: 105870404-105870431 |
| CB sk 1058 | chr3: 105870413-105870440 |
| CB sk 1059 | chr3: 105870457-105870484 |
| CB sk 1060 | chr3: 105870467-105870494 |
| CB sk 1061 | chr3: 105870476-105870503 |
| CB sk 1062 | chr3: 105870518-105870545 |
| CB sk 1063 | chr3: 105870537-105870564 |
| CB sk 1064 | chr3: 105870557-105870584 |
| CB sk 1065 | chr3: 105870567-105870594 |
| CB sk 1066 | chr3: 105870595-105870622 |
| CB sk 1067 | chr3: 105870600-105870627 |
| CB sk 1068 | chr3: 105870608-105870635 |
| CB sk 1069 | chr3: 105870611-105870638 |
| CB sk 1070 | chr3: 105870614-105870641 |
| CB sk 1071 | chr3: 105870615-105870642 |
| CB sk 1072 | chr3: 105870619-105870646 |
| CB sk 1073 | chr3: 105870636-105870663 |
| CB sk 1074 | chr3: 105870637-105870664 |
| CB sk 1075 | chr3: 105870638-105870665 |
| CB sk 1076 | chr3: 105870693-105870720 |
| CB sk 1077 | chr3: 105870721-105870748 |
| CB sk 1078 | chr3: 105870728-105870755 |
| CB sk 1079 | chr3: 105870729-105870756 |
| CB sk 1080 | chr3: 105870768-105870795 |
| CB sk 1081 | chr3: 105870810-105870837 |
| CB sk 1082 | chr3: 105870811-105870838 |
| CB sk 1083 | chr3: 105870824-105870851 |
| CB sk 1084 | chr3: 105870835-105870862 |
| CB sk 1085 | chr3: 105870840-105870867 |
| CB sk 1086 | chr3: 105870863-105870890 |
| CB sk 1087 | chr3: 105870875-105870902 |
| CB sk 1088 | chr3: 105870896-105870923 |
| CB sk 1089 | chr3: 105870916-105870943 |
| CB sk 1090 | chr3: 105870923-105870950 |

1. A method for culturing cells, the method comprising: reducing the expression and/or reducing the activity of peptidase C64 family member(s) and/or functionally active fragments thereof in the cells.

2. The method of claim 1, wherein the cells comprise immune cells.

3. The method of claim 2, wherein the immune cells comprise phagocytes, lymphocytes, neutrophils, eosinophils, and/or basophils.

4. The method of any one of claims 2-3, wherein the immune cells comprise monocytes, macrophages, and/or dendritic cells.

5. The method of any one of claims 2-4, wherein the immune cells are derived from stem cell-differentiated immune cells.

6. The method of claim 5, wherein the stem cells comprise induced pluripotent stem cells (iPSCs).

7. The method of any one of claims 2-6, wherein the immune cells comprise B cells, T cells, natural killer cells, and/or natural killer-like T cells (NKT).

8. The method of any one of claims 2-7, wherein the immune cells comprise αβ T cells and/or γδ T cells.

9. The method of any one of claims 2-8, wherein the immune cells comprise tumor-infiltrating lymphocytes (TILs).

10. The method of claim 9, wherein the TIL is a TIL derived from fragments of tumor tissue, pleural effusion, and/or peritoneal effusion, and/or a TIL derived from resuscitation after cryopreservation.

11. The method of claim 10, wherein the fragment has a volume from about 1 cubic millimeter to about 27 cubic millimeters.

12. The method of any one of claims 2-11, wherein the immune cells comprise engineered immune receptors displayed on the cell surface.

13. The method of claim 12, wherein the engineered immune receptor specifically binds to an antigen expressed on a target cell.

14. The method of any one of claims 2-13, wherein the immune cells comprise chimeric antigen receptors and/or T cell receptors.

15. The method of any one of claims 1-14, wherein reducing the expression and/or activity of peptidase C64 family member(s) in the cell comprises inhibiting a deubiquitinating enzyme and/or a zinc finger nuclease function.

16. The method of any one of claims 1-15, wherein the cells obtained with reduced expression of the peptidase C64 family member(s) and/or reduced activity show improved cellular properties compared to cells in which the expression and/or activity of the peptidase C64 family member is unchanged.

17. The method of claim 16, wherein the improved cell properties comprise one or more properties selected from the group consisting of: improved cell proliferation capacity, increased proportion of viable cells, improved proportion of cell subpopulations, increased ability to secrete cytokines, and improved killing ability of tumor cells.

18. The method of claim 17, wherein the improved cell subpopulation ratio comprises one or more properties selected from the group consisting of: increased activated cell ratio, reduced regulatory cell ratio, reduced exhausted cell ratio, increased proportion of central memory cells and/or naive cells, decreased proportion of apoptotic cells, and increased proportion of stem cell-like cells.

19. The method of any one of claims 1-18, wherein the peptidase C64 family member comprises a ubiquitin-binding domain.

20. The method of any one of claims 1-19, wherein the peptidase C64 family member comprises TNFAIP3.

21. The method of any one of claims 1-20, wherein reducing the expression and/or activity of a peptidase C64 family member in the cell comprises introducing a gene regulatory system into the cell.

22. The method of claim 21, wherein the gene regulatory system is capable of destroying the peptidase C64 family member at the DNA level.

23. The method of any one of claims 21-22, wherein the gene regulatory system comprises a guide nucleic acid molecule and an enzymatic protein.

24. The method of claim 23, wherein reducing the expression and/or activity of the peptidase C64 family member comprises: introducing a ribonucleoprotein complex (RNP) comprising the guide nucleic acid molecule and the enzymatic protein, an LNP comprising a gRNA and a Cas protein, or an LNP comprising a nucleic acid encoding a gRNA and a Cas protein into the cell.

25. The method of any one of claims 23-24, wherein the enzymatic protein comprises Cas protein, Cas protein homolog, or a functionally active fragment thereof.

26. The method of any one of claims 23-25, wherein the guide nucleic acid molecule comprises a guide RNA (gRNA).

27. The method of any one of claims 23-26, wherein the guide nucleic acid molecule is capable of binding to the sequence of the peptidase C64 family member.

28. The method of any one of claims 23-27, wherein the guide nucleic acid molecule is capable of binding to a region selected from the group defined by the genomic coordinates shown in Table 1A, or a fragment thereof.

29. The method of any one of claims 23-28, wherein the guide nucleic acid molecule is capable of binding to a region selected from the group consisting of: SEQ ID NOs: 107-212, 1562-2532, or fragments thereof.

30. The method of any one of claims 23-29, wherein the guide nucleic acid molecule is capable of binding to a nucleotide sequence located about 15 to about 25 nucleotides upstream of the 5′ end of a protospacer adjacent motif (PAM), wherein the sequence is selected from the group consisting of: AGG, TGG, CGG, and GGG.

31. The method of any one of claims 23-30, wherein the guide nucleic acid molecule comprises a targeting domain comprising the sequence shown in any one of SEQ ID NOs: 1-106, 591-1561, 7267-7324, 7419, and 7420.

32. The method of any one of claims 1-31, wherein the proportion of cells expressing the target genes is reduced and/or the expression of target gene in a single cell is reduced in cells obtained by reducing the expression and/or activity of the peptidase C64 family member, compared to cells in which the expression and/or activity of the peptidase C64 family member is unchanged.

33. The method according to any one of claims 1-32, wherein among the cells obtained by reducing the expression and/or reducing the activity of the peptidase C64 family member, the proportion of cells expressing the target gene is about 95% or less.

34. A cell produced by the method of any one of claims 1-33.

35. A composition comprising the cell of claim 34.

36. A pharmaceutical composition comprising the cell of claim 34 and/or the composition of claim 35, and optionally a pharmaceutically acceptable carrier.

37. A method of affecting cell growth, comprising administering the cell of claim 34, the composition of claim 35, and/or the pharmaceutical composition of claim 36.

38. Use of the cell of claim 34, the composition of claim 35, and/or the pharmaceutical composition of claim 36 in the preparation of a medicament, wherein the medicament is used to prevent and/or treat diseases and/or conditions.

39. Use of claim 38, wherein the disease and/or condition comprises a tumor.

40. Use of any one of claims 38-39, wherein the disease and/or condition comprises a solid tumor.

41. Use of any one of claims 38-40, wherein the disease and/or condition is one or more selected from the group consisting of: melanoma, ovarian cancer, cervical cancer, lung cancer, bladder cancer, breast cancer, head and neck cancer, pancreatic cancer, liver cancer, stomach cancer, colorectal cancer, and kidney cancer.

The application's sequence listing, which the Patent Office published only in electronic form, follows.

SEQUENCE LISTING (7420 sequences)

SEQ ID NO: 1 - RNA, 20 nt, synthetic construct
  source 1..20: mol_type = other RNA
aaaacttagggggctctaag

SEQ ID NO: 2 - RNA, 20 nt, synthetic construct
  source 1..20: mol_type = other RNA
aaaagacacacaagtcgcgt

SEQ ID NO: 3 - RNA, 20 nt, synthetic construct
  source 1..20: mol_type = other RNA
aatggtcacagggaaagatg

SEQ ID NO: 4 - RNA, 20 nt, synthetic construct
  source 1..20: mol_type = other RNA
acacttttgcttgcctcccc

SEQ ID NO: 5 - RNA, 20 nt, synthetic construct
  source 1..20: mol_type = other RNA
acatctctgagagatgctgg

SEQ ID NO: 6 - RNA, 20 nt, synthetic construct
  source 1..20: mol_type = other RNA
acctccttggagatgagata

SEQ ID NO: 7 - RNA, 20 nt, synthetic construct
  source 1..20: mol_type = other RNA
actgttgcagtggcagctga

SEQ ID NO: 8 - RNA, 20 nt, synthetic construct
  source 1..20: mol_type = other RNA
agaggccaatttactccctg

SEQ ID NO: 9 - RNA, 20 nt, synthetic construct
  source 1..20: mol_type = other RNA
agatgagatagggaaggagc

SEQ ID NO: 10 - RNA, 20 nt, synthetic construct
  source 1..20: mol_type = other RNA
agcaaagcttgtaactggca

SEQ ID NO: 11 - RNA, 20 nt, synthetic construct
  source 1..20: mol_type = other RNA
agcagggatgagactggcaa

SEQ ID NO: 12 - RNA, 20 nt, synthetic construct
  source 1..20: mol_type = other RNA
agccagtaaccatgagtatg

SEQ ID NO: 13 - RNA, 20 nt, synthetic construct
  source 1..20: mol_type = other RNA
agcctcagaatcacagtcca

SEQ ID NO: 14 - RNA, 20 nt, synthetic construct
  source 1..20: mol_type = other RNA
agtgtcagcatcccaaccag

SEQ ID NO: 15 - RNA, 20 nt, synthetic construct
  source 1..20: mol_type = other RNA
atccatggactgtgattctg

SEQ ID NO: 16 - RNA, 20 nt, synthetic construct
  source 1..20: mol_type = other RNA
atgaagcagtcctgatgcgc

SEQ ID NO: 17 - RNA, 20 nt, synthetic construct
  source 1..20: mol_type = other RNA
atgagactggcaatggtcac

SEQ ID NO: 18 - RNA, 20 nt, synthetic construct
  source 1..20: mol_type = other RNA
atgatgtcagattcagccca

SEQ ID NO: 19 - RNA, 20 nt, synthetic construct
  source 1..20: mol_type = other RNA
atgctcaggtttggtaaccc

SEQ ID NO: 20 - RNA, 20 nt, synthetic construct
  source 1..20: mol_type = other RNA
atggctaaccggaaacaggt

SEQ ID NO: 21 - RNA, 20 nt, synthetic construct
  source 1..20: mol_type = other RNA
atggtttttccctacctgcc

SEQ ID NO: 22 - RNA, 20 nt, synthetic construct
  source 1..20: mol_type = other RNA
atgtatggctaaccggaaac

SEQ ID NO: 23 - RNA, 20 nt, synthetic construct
  source 1..20: mol_type = other RNA
caaagcaaggatgttctctc

SEQ ID NO: 24 - RNA, 20 nt, synthetic construct
  source 1..20: mol_type = other RNA
caagcagatgtatggctaac

SEQ ID NO: 25 - RNA, 20 nt, synthetic construct
  source 1..20: mol_type = other RNA
caaggaggtaggacactcag

SEQ ID NO: 26 - RNA, 20 nt, synthetic construct
  source 1..20: mol_type = other RNA
caattccttctttcctgggg

SEQ ID NO: 27 - RNA, 20 nt, synthetic construct
  source 1..20: mol_type = other RNA
cacatctctgagagatgctg

SEQ ID NO: 28 - RNA, 20 nt, synthetic construct
  source 1..20: mol_type = other RNA
cagaaatgcagaaccatcca

SEQ ID NO: 29 - RNA, 20 nt, synthetic construct
  source 1..20: mol_type = other RNA
cagcatcccaaccagaggat

SEQ ID NO: 30 - RNA, 20 nt, synthetic construct
  source 1..20: mol_type = other RNA
ccactgcaacagtgggctta

SEQ ID NO: 31 - RNA, 20 nt, synthetic construct
  source 1..20: mol_type = other RNA
cctcgagctgtcagtcatca

SEQ ID NO: 32 - RNA, 20 nt, synthetic construct
  source 1..20: mol_type = other RNA
ccttggagatgagataggga

SEQ ID NO: 33 - RNA, 20 nt, synthetic construct
  source 1..20: mol_type = other RNA
ctctgagtgtcctacctcct

SEQ ID NO: 34 - RNA, 20 nt, synthetic construct
  source 1..20: mol_type = other RNA
ctgttaacactgtgtcctgg

SEQ ID NO: 35 - RNA, 20 nt, synthetic construct
  source 1..20: mol_type = other RNA
cttccttgagcttcttgcag

SEQ ID NO: 36 - RNA, 20 nt, synthetic construct
  source 1..20: mol_type = other RNA
cttgctttgagtcaggctgt

SEQ ID NO: 37 - RNA, 20 nt, synthetic construct
  source 1..20: mol_type = other RNA
ctttgctttctaaggccacc

SEQ ID NO: 38 - RNA, 20 nt, synthetic construct
  source 1..20: mol_type = other RNA
ctttggacttggaaggtgtg

SEQ ID NO: 39 - RNA, 20 nt, synthetic construct
  source 1..20: mol_type = other RNA
cttttgctgtcccaatacca

SEQ ID NO: 40 - RNA, 20 nt, synthetic construct
  source 1..20: mol_type = other RNA
gaaaaacttagggggctcta

SEQ ID NO: 41 - RNA, 20 nt, synthetic construct
  source 1..20: mol_type = other RNA
gaaaagacacacaagtcgcg

SEQ ID NO: 42 - RNA, 20 nt, synthetic construct
  source 1..20: mol_type = other RNA
gaacatccttgctttgagtc

SEQ ID NO: 43 - RNA, 20 nt, synthetic construct
  source 1..20: mol_type = other RNA
gaggaaagataagctcttcg

SEQ ID NO: 44 - RNA, 20 nt, synthetic construct
  source 1..20: mol_type = other RNA
gataaaggctgccattttgg

SEQ ID NO: 45 - RNA, 20 nt, synthetic construct
  source 1..20: mol_type = other RNA
gatctctgagtggaaagaac

SEQ ID NO: 46 - RNA, 20 nt, synthetic construct
  source 1..20: mol_type = other RNA
gatgagatagggaaggagca

SEQ ID NO: 47 - RNA, 20 nt, synthetic construct
  source 1..20: mol_type = other RNA
gatgctcaggtttggtaacc

SEQ ID NO: 48 - RNA, 20 nt, synthetic construct
  source 1..20: mol_type = other RNA
gatgtgaagccagatcctca

SEQ ID NO: 49 - RNA, 20 nt, synthetic construct
  source 1..20: mol_type = other RNA
gcaaagcttgtaactggcaa

SEQ ID NO: 50 - RNA, 20 nt, synthetic construct
  source 1..20: mol_type = other RNA
gccaaaatgatcacaggcgg

SEQ ID NO: 51 - RNA, 20 nt, synthetic construct
  source 1..20: mol_type = other RNA
gccctagaagtacaatagga

SEQ ID NO: 52 - RNA, 20 nt, synthetic construct
  source 1..20: mol_type = other RNA
gctccctttaaaaaggcagc

SEQ ID NO: 53 - RNA, 20 nt, synthetic construct
  source 1..20: mol_type = other RNA
gcttttgctgtcccaatacc

SEQ ID NO: 54 - RNA, 20 nt, synthetic construct
  source 1..20: mol_type = other RNA
ggaacttctttggacttgga

SEQ ID NO: 55 - RNA, 20 nt, synthetic construct
  source 1..20: mol_type = other RNA
ggatggttctgcatttctgc

SEQ ID NO: 56 - RNA, 20 nt, synthetic construct
  source 1..20: mol_type = other RNA
ggcattgccaaaatgatcac

SEQ ID NO: 57 - RNA, 20 nt, synthetic construct
  source 1..20: mol_type = other RNA
ggtaggagaggaggaacctt

SEQ ID NO: 58 - RNA, 20 nt, synthetic construct
  source 1..20: mol_type = other RNA
ggtcacctcctgcaagaagt

SEQ ID NO: 59 - RNA, 20 nt, synthetic construct
  source 1..20: mol_type = other RNA
gtcacctcctgcaagaagtg

SEQ ID NO: 60 - RNA, 20 nt, synthetic construct
  source 1..20: mol_type = other RNA
gtcccaataccagggtacca

SEQ ID NO: 61 - RNA, 20 nt, synthetic construct
  source 1..20: mol_type = other RNA
gttaacactgtgtcctgggg

SEQ ID NO: 62 - RNA, 20 nt, synthetic construct
  source 1..20: mol_type = other RNA
gttgcagtagccgttgcact

SEQ ID NO: 63 - RNA, 20 nt, synthetic construct
  source 1..20: mol_type = other RNA
taagggtgtctgagcaggag

SEQ ID NO: 64 - RNA, 20 nt, synthetic construct
  source 1..20: mol_type = other RNA
tacctccttggagatgagat

SEQ ID NO: 65 - RNA, 20 nt, synthetic construct
  source 1..20: mol_type = other RNA
tatctcatctccaaggaggt

SEQ ID NO: 66 - RNA, 20 nt, synthetic construct
  source 1..20: mol_type = other RNA
tatggctaaccggaaacagg

SEQ ID NO: 67 - RNA, 20 nt, synthetic construct
  source 1..20: mol_type = other RNA
tcaaggaagctcagggaaaa

SEQ ID NO: 68 - RNA, 20 nt, synthetic construct
  source 1..20: mol_type = other RNA
tcacatctctgagagatgct

SEQ ID NO: 69 - RNA, 20 nt, synthetic construct
  source 1..20: mol_type = other RNA
tcagaatcacagtccatgga

SEQ ID NO: 70 - RNA, 20 nt, synthetic construct
  source 1..20: mol_type = other RNA
tcagcatcccaaccagagga

SEQ ID NO: 71 - RNA, 20 nt, synthetic construct
  source 1..20: mol_type = other RNA
tcagctgccactgcaacagt

SEQ ID NO: 72 - RNA, 20 nt, synthetic construct
  source 1..20: mol_type = other RNA
tcaggactgcttcatcgtct

SEQ ID NO: 73 - RNA, 20 nt, synthetic construct
  source 1..20: mol_type = other RNA
tcatcgtcttggctgagaaa

SEQ ID NO: 74 - RNA, 20 nt, synthetic construct
  source 1..20: mol_type = other RNA
tcccaataccagggtaccat

SEQ ID NO: 75 - RNA, 20 nt, synthetic construct
  source 1..20: mol_type = other RNA
tccctatctcatctccaagg

SEQ ID NO: 76 - RNA, 20 nt, synthetic construct
  source 1..20: mol_type = other RNA
tcgtctgggaaaaacttagg

SEQ ID NO: 77 - RNA, 20 nt, synthetic construct
  source 1..20: mol_type = other RNA
tctgttaacactgtgtcctg

SEQ ID NO: 78 - RNA, 20 nt, synthetic construct
  source 1..20: mol_type = other RNA
tgaagcagtcctgatgcgca

SEQ ID NO: 79 - RNA, 20 nt, synthetic construct
  source 1..20: mol_type = other RNA
tgagactggcaatggtcaca

SEQ ID NO: 80 - RNA, 20 nt, synthetic construct
  source 1..20: mol_type = other RNA
tgccaaaatgatcacaggcg

SEQ ID NO: 81 - RNA, 20 nt, synthetic construct
  source 1..20: mol_type = other RNA
tgctgccctagaagtacaat

SEQ ID NO: 82 - RNA, 20 nt, synthetic construct
  source 1..20: mol_type = other RNA
tgggcaagttcctgaccaca

SEQ ID NO: 83 - RNA, 20 nt, synthetic construct
  source 1..20: mol_type = other RNA
tggtaggagaggaggaacct

SEQ ID NO: 84 - RNA, 20 nt, synthetic construct
  source 1..20: mol_type = other RNA
tgttaacactgtgtcctggg

SEQ ID NO: 85 - RNA, 20 nt, synthetic construct
  source 1..20: mol_type = other RNA
ttcatcgtcttggctgagaa

SEQ ID NO: 86 - RNA, 20 nt, synthetic construct
  source 1..20: mol_type = other RNA
ttcctcctctcctaccaagc

SEQ ID NO: 87 - RNA, 20 nt, synthetic construct
  source 1..20: mol_type = other RNA
ttccttgagcttcttgcaga

SEQ ID NO: 88 - RNA, 20 nt, synthetic construct
  source 1..20: mol_type = other RNA
ttgccaaaatgatcacaggc

SEQ ID NO: 89 - RNA, 20 nt, synthetic construct
  source 1..20: mol_type = other RNA
ttggacttggaaggtgtgcg

SEQ ID NO: 90 - RNA, 20 nt, synthetic construct
  source 1..20: mol_type = other RNA
tttgctttctaaggccacct

SEQ ID NO: 91 - RNA, 20 nt, synthetic construct
  source 1..20: mol_type = other RNA
tttggacttggaaggtgtgc

SEQ ID NO: 92 - RNA, 20 nt, synthetic construct
  source 1..20: mol_type = other RNA
tttggcaatgccaagtgcaa

SEQ ID NO: 93 - RNA, 20 nt, synthetic construct
  source 1..20: mol_type = other RNA
ggggcacgcccagaatccca

SEQ ID NO: 94 - RNA, 20 nt, synthetic construct
  source 1..20: mol_type = other RNA
cttgtggcgctgaaaacgaa

SEQ ID NO: 95 - RNA, 20 nt, synthetic construct
  source 1..20: mol_type = other RNA
tatgccatgagtgctcagag

SEQ ID NO: 96 - RNA, 19 nt, synthetic construct
  source 1..19: mol_type = other RNA
ttgtggcgctgaaaacgaa

SEQ ID NO: 97 - RNA, 19 nt, synthetic construct
  source 1..19: mol_type = other RNA
cgagaagtccggaagcttg

SEQ ID NO: 98 - RNA, 19 nt, synthetic construct
  source 1..19: mol_type = other RNA
aggcaattgccgtcacctg

SEQ ID NO: 99 - RNA, 20 nt, synthetic construct
  source 1..20: mol_type = other RNA
cgggatccaagtgccttgtg

SEQ ID NO: 100 - RNA, 20 nt, synthetic construct
  source 1..20: mol_type = other RNA
atgtcctggtaacatcctgg

SEQ ID NO: 101 - RNA, 20 nt, synthetic construct
  source 1..20: mol_type = other RNA
gccgtcacctgaggacagaa

SEQ ID NO: 102 - RNA, 20 nt, synthetic construct
  source 1..20: mol_type = other RNA
gtgatagaaatccccgtcca

SEQ ID NO: 103 - RNA, 20 nt, synthetic construct
  source 1..20: mol_type = other RNA
cgtgaagttgccgggcgttg

SEQ ID NO: 104 - RNA, 20 nt, synthetic construct
  source 1..20: mol_type = other RNA
tcgagaagtccggaagcttg

SEQ ID NO: 105 - RNA, 20 nt, synthetic construct
  source 1..20: mol_type = other RNA
tcaactggtgtcgagaagtc

SEQ ID NO: 106 - RNA, 20 nt, synthetic construct
  source 1..20: mol_type = other RNA
tgtcatagccgagaacaatg

SEQ ID NO: 107 - DNA, 28 bp, synthetic construct
  source 1..28: mol_type = other DNA
tgggaaaaacttagggggctctaagggg

SEQ ID NO: 108 - DNA, 28 bp, synthetic construct
  source 1..28: mol_type = other DNA
aagggaaaagacacacaagtcgcgtggg

SEQ ID NO: 109 - DNA, 28 bp, synthetic construct
  source 1..28: mol_type = other DNA
ctggcaatggtcacagggaaagatgtgg

SEQ ID NO: 110 - DNA, 28 bp, synthetic construct
  source 1..28: mol_type = other DNA
ttgatacacttttgcttgcctccccagg

SEQ ID NO: 111 - DNA, 28 bp, synthetic construct
  source 1..28: mol_type = other DNA
gcttcacatctctgagagatgctggggg

SEQ ID NO: 112 - DNA, 28 bp, synthetic construct
  source 1..28: mol_type = other DNA
gtcctacctccttggagatgagataggg

SEQ ID NO: 113 - DNA, 28 bp, synthetic construct
  source 1..28: mol_type = other DNA
agcccactgttgcagtggcagctgaggg

SEQ ID NO: 114 - DNA, 28 bp, synthetic construct
  source 1..28: mol_type = other DNA
atcaaagaggccaatttactccctgtgg

SEQ ID NO: 115 - DNA, 28 bp, synthetic construct
  source 1..28: mol_type = other DNA
cttggagatgagatagggaaggagcagg

SEQ ID NO: 116 - DNA, 28 bp, synthetic construct
  source 1..28: mol_type = other DNA
tagaaagcaaagcttgtaactggcaagg

SEQ ID NO: 117 - DNA, 28 bp, synthetic construct
  source 1..28: mol_type = other DNA
gaaggagcagggatgagactggcaatgg

SEQ ID NO: 118 - DNA, 28 bp, synthetic construct
  source 1..28: mol_type = other DNA
gcaaaagccagtaaccatgagtatgagg

SEQ ID NO: 119 - DNA, 28 bp, synthetic construct
  source 1..28: mol_type = other DNA
tcagcagcctcagaatcacagtccatgg

SEQ ID NO: 120 - DNA, 28 bp, synthetic construct
  source 1..28: mol_type = other DNA
catggagtgtcagcatcccaaccagagg

SEQ ID NO: 121 - DNA, 28 bp, synthetic construct
  source 1..28: mol_type = other DNA
gaaccatccatggactgtgattctgagg

SEQ ID NO: 122 - DNA, 28 bp, synthetic construct
  source 1..28: mol_type = other DNA
agacgatgaagcagtcctgatgcgcagg

SEQ ID NO: 123 - DNA, 28 bp, synthetic construct
  source 1..28: mol_type = other DNA
cagggatgagactggcaatggtcacagg

SEQ ID NO: 124 - DNA, 28 bp, synthetic construct
  source 1..28: mol_type = other DNA
aagggatgatgtcagattcagcccaagg

SEQ ID NO: 125 - DNA, 28 bp, synthetic construct
  source 1..28: mol_type = other DNA
ccacgatgctcaggtttggtaacccggg

SEQ ID NO: 126 - DNA, 28 bp, synthetic construct
  source 1..28: mol_type = other DNA
gatgtatggctaaccggaaacaggtggg

SEQ ID NO: 127 - DNA, 28 bp, synthetic construct
  source 1..28: mol_type = other DNA
agttcatggtttttccctacctgcccgg

SEQ ID NO: 128 - DNA, 28 bp, synthetic construct
  source 1..28: mol_type = other DNA
agcagatgtatggctaaccggaaacagg

SEQ ID NO: 129 - DNA, 28 bp, synthetic construct
  source 1..28: mol_type = other DNA
tgactcaaagcaaggatgttctctcagg

SEQ ID NO: 130 - DNA, 28 bp, synthetic construct
  source 1..28: mol_type = other DNA
cagttcaagcagatgtatggctaaccgg

SEQ ID NO: 131 - DNA, 28 bp, synthetic construct
  source 1..28: mol_type = other DNA
atctccaaggaggtaggacactcagagg

SEQ ID NO: 132 - DNA, 28 bp, synthetic construct
  source 1..28: mol_type = other DNA
ggatgcaattccttctttcctggggagg

SEQ ID NO: 133 - DNA, 28 bp, synthetic construct
  source 1..28: mol_type = other DNA
ggcttcacatctctgagagatgctgggg

SEQ ID NO: 134 - DNA, 28 bp, synthetic construct
  source 1..28: mol_type = other DNA
cccggcagaaatgcagaaccatccatgg

SEQ ID NO: 135 - DNA, 28 bp, synthetic construct
  source 1..28: mol_type = other DNA
agtgtcagcatcccaaccagaggatggg

SEQ ID NO: 136 - DNA, 28 bp, synthetic construct
  source 1..28: mol_type = other DNA
agctgccactgcaacagtgggcttaagg

SEQ ID NO: 137 - DNA, 28 bp, synthetic construct
  source 1..28: mol_type = other DNA
tggggcctcgagctgtcagtcatcatgg

SEQ ID NO: 138 - DNA, 28 bp, synthetic construct
  source 1..28: mol_type = other DNA
tacctccttggagatgagatagggaagg

SEQ ID NO: 139 - DNA, 28 bp, synthetic construct
  source 1..28: mol_type = other DNA
aatgcctctgagtgtcctacctccttgg

SEQ ID NO: 140 - DNA, 28 bp, synthetic construct
  source 1..28: mol_type = other DNA
attttctgttaacactgtgtcctggggg

SEQ ID NO: 141 - DNA, 28 bp, synthetic construct
  source 1..28: mol_type = other DNA
ctgagcttccttgagcttcttgcagagg

SEQ ID NO: 142 - DNA, 28 bp, synthetic construct
  source 1..28: mol_type = other DNA
acatccttgctttgagtcaggctgtggg

SEQ ID NO: 143 - DNA, 28 bp, synthetic construct
  source 1..28: mol_type = other DNA
acaagctttgctttctaaggccacctgg

SEQ ID NO: 144 - DNA, 28 bp, synthetic construct
  source 1..28: mol_type = other DNA
aacttctttggacttggaaggtgtgcgg

SEQ ID NO: 145 - DNA, 28 bp, synthetic construct
  source 1..28: mol_type = other DNA
actggcttttgctgtcccaataccaggg

SEQ ID NO: 146 - DNA, 28 bp, synthetic construct
  source 1..28: mol_type = other DNA
tctgggaaaaacttagggggctctaagg

SEQ ID NO: 147 - DNA, 28 bp, synthetic construct
  source 1..28: mol_type = other DNA
aaagggaaaagacacacaagtcgcgtgg

SEQ ID NO: 148 - DNA, 28 bp, synthetic construct
  source 1..28: mol_type = other DNA
tgagagaacatccttgctttgagtcagg

SEQ ID NO: 149 - DNA, 28 bp, synthetic construct
  source 1..28: mol_type = other DNA
caggagaggaaagataagctcttcgtgg

SEQ ID NO: 150 - DNA, 28 bp, synthetic construct
  source 1..28: mol_type = other DNA
ccagagataaaggctgccattttggggg

SEQ ID NO: 151 - DNA, 28 bp, synthetic construct
  source 1..28: mol_type = other DNA
ggctcgatctctgagtggaaagaacagg

SEQ ID NO: 152 - DNA, 28 bp, synthetic construct
  source 1..28: mol_type = other DNA
ttggagatgagatagggaaggagcaggg

SEQ ID NO: 153 - DNA, 28 bp, synthetic construct
  source 1..28: mol_type = other DNA
cccacgatgctcaggtttggtaacccgg

SEQ ID NO: 154 - DNA, 28 bp, synthetic construct
  source 1..28: mol_type = other DNA
tcagagatgtgaagccagatcctcatgg

SEQ ID NO: 155 - DNA, 28 bp, synthetic construct
  source 1..28: mol_type = other DNA
agaaagcaaagcttgtaactggcaaggg

SEQ ID NO: 156 - DNA, 28 bp, synthetic construct
  source 1..28: mol_type = other DNA
gcattgccaaaatgatcacaggcggggg

SEQ ID NO: 157 - DNA, 28 bp, synthetic construct
  source 1..28: mol_type = other DNA
atgctgccctagaagtacaataggaagg

SEQ ID NO: 158 - DNA, 28 bp, synthetic construct
  source 1..28: mol_type = other DNA
ctagagctccctttaaaaaggcagctgg

SEQ ID NO: 159 - DNA, 28 bp, synthetic construct
  source 1..28: mol_type = other DNA
tactggcttttgctgtcccaataccagg

SEQ ID NO: 160 - DNA, 28 bp, synthetic construct
  source 1..28: mol_type = other DNA
ggccaggaacttctttggacttggaagg

SEQ ID NO: 161 - DNA, 28 bp, synthetic construct
  source 1..28: mol_type = other DNA
tccatggatggttctgcatttctgccgg

SEQ ID NO: 162 - DNA, 28 bp, synthetic construct
  source 1..28: mol_type = other DNA
cacttggcattgccaaaatgatcacagg

SEQ ID NO: 163 - DNA, 28 bp, synthetic construct
  source 1..28: mol_type = other DNA
tgcttggtaggagaggaggaaccttggg

SEQ ID NO: 164 - DNA, 28 bp, synthetic construct
  source 1..28: mol_type = other DNA
aggtgggtcacctcctgcaagaagtggg

SEQ ID NO: 165 - DNA, 28 bp, synthetic construct
  source 1..28: mol_type = other DNA
ggtgggtcacctcctgcaagaagtgggg

SEQ ID NO: 166 - DNA, 28 bp, synthetic construct
  source 1..28: mol_type = other DNA
ttgctgtcccaataccagggtaccatgg

SEQ ID NO: 167 - DNA, 28 bp, synthetic construct
  source 1..28: mol_type = other DNA
tttctgttaacactgtgtcctggggggg

SEQ ID NO: 168 - DNA, 28 bp, synthetic construct
  source 1..28: mol_type = other DNA
cattcgttgcagtagccgttgcacttgg

SEQ ID NO: 169 - DNA, 28 bp, synthetic construct
  source 1..28: mol_type = other DNA
gggcttaagggtgtctgagcaggagagg

SEQ ID NO: 170 - DNA, 28 bp, synthetic construct
  source 1..28: mol_type = other DNA
tgtcctacctccttggagatgagatagg

SEQ ID NO: 171 - DNA, 28 bp, synthetic construct
  source 1..28: mol_type = other DNA
ttccctatctcatctccaaggaggtagg

SEQ ID NO: 172 - DNA, 28 bp, synthetic construct
  source 1..28: mol_type = other DNA
agatgtatggctaaccggaaacaggtgg

SEQ ID NO: 173 - DNA, 28 bp, synthetic construct
  source 1..28: mol_type = other DNA
gaagctcaaggaagctcagggaaaatgg

SEQ ID NO: 174 - DNA, 28 bp, synthetic construct
  source 1..28: mol_type = other DNA
tggcttcacatctctgagagatgctggg

SEQ ID NO: 175 - DNA, 28 bp, synthetic construct
  source 1..28: mol_type = other DNA
cagcctcagaatcacagtccatggatgg

SEQ ID NO: 176 - DNA, 28 bp, synthetic construct
  source 1..28: mol_type = other DNA
gagtgtcagcatcccaaccagaggatgg

SEQ ID NO: 177 - DNA, 28 bp, synthetic construct
  source 1..28: mol_type = other DNA
acccctcagctgccactgcaacagtggg

SEQ ID NO: 178 - DNA, 28 bp, synthetic construct
  source 1..28: mol_type = other DNA
gcgcatcaggactgcttcatcgtcttgg

SEQ ID NO: 179 - DNA, 28 bp, synthetic construct
  source 1..28: mol_type = other DNA
ctgcttcatcgtcttggctgagaaaggg

SEQ ID NO: 180 - DNA, 28 bp, synthetic construct
  source 1..28: mol_type = other DNA
tgctgtcccaataccagggtaccatggg

SEQ ID NO: 181 - DNA, 28 bp, synthetic construct
  source 1..28: mol_type = other DNA
ctccttccctatctcatctccaaggagg

SEQ ID NO: 182 - DNA, 28 bp, synthetic construct
  source 1..28: mol_type = other DNA
aagattcgtctgggaaaaacttaggggg

SEQ ID NO: 183 - DNA, 28 bp, synthetic construct
  source 1..28: mol_type = other DNA
tattttctgttaacactgtgtcctgggg

SEQ ID NO: 184 - DNA, 28 bp, synthetic construct
  source 1..28: mol_type = other DNA
gacgatgaagcagtcctgatgcgcaggg

SEQ ID NO: 185 - DNA, 28 bp, synthetic construct
  source 1..28: mol_type = other DNA
agggatgagactggcaatggtcacaggg

SEQ ID NO: 186 - DNA, 28 bp, synthetic construct
  source 1..28: mol_type = other DNA
ggcattgccaaaatgatcacaggcgggg

SEQ ID NO: 187 - DNA, 28 bp, synthetic construct
  source 1..28: mol_type = other DNA
tgaaatgctgccctagaagtacaatagg

SEQ ID NO: 188 - DNA, 28 bp, synthetic construct
  source 1..28: mol_type = other DNA
ggctgtgggcaagttcctgaccacaggg

SEQ ID NO: 189 - DNA, 28 bp, synthetic construct
  source 1..28: mol_type = other DNA
ctgcttggtaggagaggaggaaccttgg

SEQ ID NO: 190 - DNA, 28 bp, synthetic construct
  source 1..28: mol_type = other DNA
ttttctgttaacactgtgtcctgggggg

SEQ ID NO: 191 - DNA, 28 bp, synthetic construct
  source 1..28: mol_type = other DNA
actgcttcatcgtcttggctgagaaagg

SEQ ID NO: 192 - DNA, 28 bp, synthetic construct
  source 1..28: mol_type = other DNA
caaggttcctcctctcctaccaagcagg

SEQ ID NO: 193 - DNA, 28 bp, synthetic construct
  source 1..28: mol_type = other DNA
tgagcttccttgagcttcttgcagaggg

SEQ ID NO: 194 - DNA, 28 bp, synthetic construct
  source 1..28: mol_type = other DNA
tggcattgccaaaatgatcacaggcggg

SEQ ID NO: 195 - DNA, 28 bp, synthetic construct
  source 1..28: mol_type = other DNA
cttctttggacttggaaggtgtgcgggg

SEQ ID NO: 196 - DNA, 28 bp, synthetic construct
  source 1..28: mol_type = other DNA
caagctttgctttctaaggccacctggg

SEQ ID NO: 197 - DNA, 28 bp, synthetic construct
  source 1..28: mol_type = other DNA
acttctttggacttggaaggtgtgcggg

SEQ ID NO: 198 - DNA, 28 bp, synthetic construct
  source 1..28: mol_type = other DNA
atcattttggcaatgccaagtgcaacgg

SEQ ID NO: 199 - DNA, 28 bp, synthetic construct
  source 1..28: mol_type = other DNA
agagaggggcacgcccagaatcccatgg

SEQ ID NO: 200 - DNA, 28 bp, synthetic construct
  source 1..28: mol_type = other DNA
ggaagcttgtggcgctgaaaacgaacgg

SEQ ID NO: 201 - DNA, 28 bp, synthetic construct
  source 1..28: mol_type = other DNA
gcctttatgccatgagtgctcagagagg

SEQ ID NO: 202 - DNA, 28 bp, synthetic construct
  source 1..28: mol_type = other DNA
ggaagcttgtggcgctgaaaacgaacgg

SEQ ID NO: 203 - DNA, 28 bp, synthetic construct
  source 1..28: mol_type = other DNA
tggtgtcgagaagtccggaagcttgtgg

SEQ ID NO: 204 - DNA, 28 bp, synthetic construct
  source 1..28: mol_type = other DNA
tgcatgaggcaattgccgtcacctgagg

SEQ ID NO: 205 - DNA, 28 bp, synthetic construct
  source 1..28: mol_type = other DNA
cttcccgggatccaagtgccttgtgtgg

SEQ ID NO: 206 - DNA, 28 bp, synthetic construct
  source 1..28: mol_type = other DNA
attaaatgtcctggtaacatcctggagg

SEQ ID NO: 207 - DNA, 28 bp, synthetic construct
  source 1..28: mol_type = other DNA
caattgccgtcacctgaggacagaaagg

SEQ ID NO: 208 - DNA, 28 bp, synthetic construct
  source 1..28: mol_type = other DNA
taatggtgatagaaatccccgtccaagg

SEQ ID NO: 209 - DNA, 28 bp, synthetic construct
  source 1..28: mol_type = other DNA
gctggcgtgaagttgccgggcgttgtgg

SEQ ID NO: 210 - DNA, 28 bp, synthetic construct
  source 1..28: mol_type = other DNA
tggtgtcgagaagtccggaagcttgtgg

SEQ ID NO: 211 - DNA, 28 bp, synthetic construct
  source 1..28: mol_type = other DNA
gaaactcaactggtgtcgagaagtccgg

SEQ ID NO: 212 - DNA, 28 bp, synthetic construct
  source 1..28: mol_type = other DNA
atggctgtcatagccgagaacaatgggg

SEQ ID NO: 213 - RNA, 20 nt, synthetic construct
  source 1..20: mol_type = other RNA
aaaccgtcttttctctcaga

SEQ ID NO: 214 - RNA, 20 nt, synthetic construct
  source 1..20: mol_type = other RNA
aaagacaatcacctcttgaa

SEQ ID NO: 215 - RNA, 20 nt, synthetic construct
  source 1..20: mol_type = other RNA
aacacaggttcccccaccca

SEQ ID NO: 216 - RNA, 20 nt, synthetic construct
  source 1..20: mol_type = other RNA
aaccaaagatactgtaggat

SEQ ID NO: 217 - RNA, 20 nt, synthetic construct
  source 1..20: mol_type = other RNA
aaccaatcctacagtatctt

SEQ ID NO: 218 - RNA, 20 nt, synthetic construct
  source 1..20: mol_type = other RNA
aagaagagggtgtagacgga

SEQ ID NO: 219 - RNA, 20 nt, synthetic construct
  source 1..20: mol_type = other RNA
aagacaatcacctcttgaaa

SEQ ID NO: 220 - RNA, 20 nt, synthetic construct
  source 1..20: mol_type = other RNA
acacaggttcccccacccat

SEQ ID NO: 221 - RNA, 20 nt, synthetic construct
  source 1..20: mol_type = other RNA
agatactgtaggattggttc

SEQ ID NO: 222 - RNA, 20 nt, synthetic construct
  source 1..20: mol_type = other RNA
agtcatctcgcccttcccca

SEQ ID NO: 223 - RNA, 20 nt, synthetic construct
  source 1..20: mol_type = other RNA
atctcgcccttccccatggg

SEQ ID NO: 224 - RNA, 20 nt, synthetic construct
  source 1..20: mol_type = other RNA
caaaccgtcttttctctcag

SEQ ID NO: 225 - RNA, 20 nt, synthetic construct
  source 1..20: mol_type = other RNA
cacaggttcccccacccatg

SEQ ID NO: 226 - RNA, 20 nt, synthetic construct
  source 1..20: mol_type = other RNA
caggaaggaaatgcacctat

SEQ ID NO: 227 - RNA, 20 nt, synthetic construct
  source 1..20: mol_type = other RNA
catctgccacagagcgctgg

SEQ ID NO: 228 - RNA, 20 nt, synthetic construct
  source 1..20: mol_type = other RNA
ccacaaaccaaagatactgt

SEQ ID NO: 229 - RNA, 20 nt, synthetic construct
  source 1..20: mol_type = other RNA
ccaggaaggaaatgcaccta

SEQ ID NO: 230 - RNA, 20 nt, synthetic construct
  source 1..20: mol_type = other RNA
ccgtcttttctctcagaggg

SEQ ID NO: 231 - RNA, 20 nt, synthetic construct
  source 1..20: mol_type = other RNA
cctctagctgtctgcctcag

SEQ ID NO: 232 - RNA, 20 nt, synthetic construct
  source 1..20: mol_type = other RNA
cgtcttttctctcagagggt

SEQ ID NO: 233 - RNA, 20 nt, synthetic construct
  source 1..20: mol_type = other RNA
ctacagtatctttggtttgt

SEQ ID NO: 234 - RNA, 20 nt, synthetic construct
  source 1..20: mol_type = other RNA
ctcatctgccacagagcgct

SEQ ID NO: 235 - RNA, 20 nt, synthetic construct
  source 1..20: mol_type = other RNA
ctctagctgtctgcctcagt

SEQ ID NO: 236 - RNA, 20 nt, synthetic construct
  source 1..20: mol_type = other RNA
cttatcctgctgcccctgta

SEQ ID NO: 237 - RNA, 20 nt, synthetic construct
  source 1..20: mol_type = other RNA
ctttattgatgtgttacagg

SEQ ID NO: 238 - RNA, 20 nt, synthetic construct
  source 1..20: mol_type = other RNA
gaagaagagggtgtagacgg

SEQ ID NO: 239 - RNA, 20 nt, synthetic construct
  source 1..20: mol_type = other RNA
gaatcggcacttgatcccat

SEQ ID NO: 240 - RNA, 20 nt, synthetic construct
  source 1..20: mol_type = other RNA
gagcacagatgaggcctcat

SEQ ID NO: 241 - RNA, 20 nt, synthetic construct
  source 1..20: mol_type = other RNA
gcccagcgagagcacagatg

SEQ ID NO: 242 - RNA, 20 nt, synthetic construct
  source 1..20: mol_type = other RNA
gccgattcttccacccagag

SEQ ID NO: 243 - RNA, 20 nt, synthetic construct
  source 1..20: mol_type = other RNA
gccgctctgggtggaagaat

SEQ ID NO: 244 - RNA, 20 nt, synthetic construct
  source 1..20: mol_type = other RNA
gcctcatctgtgctctcgct

SEQ ID NO: 245 - RNA, 20 nt, synthetic construct
  source 1..20: mol_type = other RNA
gctcatctgccacagagcgc

SEQ ID NO: 246 - RNA, 20 nt, synthetic construct
  source 1..20: mol_type = other RNA
gctgggaatgggctgctcaa

SEQ ID NO: 247 - RNA, 20 nt, synthetic construct
  source 1..20: mol_type = other RNA
ggagaagaagagggtgtaga

SEQ ID NO: 248 - RNA, 20 nt, synthetic construct
  source 1..20: mol_type = other RNA
ggcctcatctgtgctctcgc

SEQ ID NO: 249 - RNA, 20 nt, synthetic construct
  source 1..20: mol_type = other RNA
ggcgagatgactctgaataa

SEQ ID NO: 250 - RNA, 20 nt, synthetic construct
  source 1..20: mol_type = other RNA
ggggggtgagaggagagcat

SEQ ID NO: 251 - RNA, 20 nt, synthetic construct
  source 1..20: mol_type = other RNA
gtactttattgatgtgttac

SEQ ID NO: 252 - RNA, 20 nt, synthetic construct
  source 1..20: mol_type = other RNA
gtagtttaaggagacgctgc

SEQ ID NO: 253 - RNA, 20 nt, synthetic construct
  source 1..20: mol_type = other RNA
gtcatctcgcccttccccat

SEQ ID NO: 254 - RNA, 20 nt, synthetic construct
  source 1..20: mol_type = other RNA
gtgagaggagagcattggca

SEQ ID NO: 255 - RNA, 20 nt, synthetic construct
  source 1..20: mol_type = other RNA
gtgcatttccttcctggaag

SEQ ID NO: 256 - RNA, 20 nt, synthetic construct
  source 1..20: mol_type = other RNA
gttcccccacccatggggaa

SEQ ID NO: 257 - RNA, 20 nt, synthetic construct
  source 1..20: mol_type = other RNA
tcatctgccacagagcgctg

SEQ ID NO: 258 - RNA, 20 nt, synthetic construct
  source 1..20: mol_type = other RNA
tcattgtgagccctttcaag

SEQ ID NO: 259 - RNA, 20 nt, synthetic construct
  source 1..20: mol_type = other RNA
tccctcttgattcctcttcc

SEQ ID NO: 260 - RNA, 20 nt, synthetic construct
  source 1..20: mol_type = other RNA
tcctggaagaggaatcaaga

SEQ ID NO: 261 - RNA, 20 nt, synthetic construct
  source 1..20: mol_type = other RNA
tctcgcccttccccatgggt

SEQ ID NO: 262 - RNA, 20 nt, synthetic construct
  source 1..20: mol_type = other RNA
tctgagagaaaagacggttt

SEQ ID NO: 263 - RNA, 20 nt, synthetic construct
  source 1..20: mol_type = other RNA
tcttgattcctcttccagga

SEQ ID NO: 264 - RNA, 20 nt, synthetic construct
  source 1..20: mol_type = other RNA
tggcccaaagcccagcctga

SEQ ID NO: 265 - RNA, 20 nt, synthetic construct
  source 1..20: mol_type = other RNA
ttatcctgctgcccctgtag

SEQ ID NO: 266 - RNA, 20 nt, synthetic construct
  source 1..20: mol_type = other RNA
ttcctggaagaggaatcaag

SEQ ID NO: 267 - RNA, 20 nt, synthetic construct
  source 1..20: mol_type = other RNA
ttgatgtgttacaggaggta

SEQ ID NO: 268 - RNA, 20 nt, synthetic construct
  source 1..20: mol_type = other RNA
tttctctcagagggtgggga

SEQ ID NO: 269 - RNA, 20 nt, synthetic construct
  source 1..20: mol_type = other RNA
accgtgacctccaaggcgag

SEQ ID NO: 270 - RNA, 20 nt, synthetic construct
  source 1..20: mol_type = other RNA
acaccatcacgacgcgtggg

SEQ ID NO: 271 - RNA, 20 nt, synthetic construct
  source 1..20: mol_type = other RNA
ggagtggaagcgcttcatcg

SEQ ID NO: 272 - RNA, 20 nt, synthetic construct
  source 1..20: mol_type = other RNA
agctggcctacgagtctgac

SEQ ID NO: 273 - RNA, 20 nt, synthetic construct
  source 1..20: mol_type = other RNA
gtcgtgatggtgtgaacacc

SEQ ID NO: 274 - RNA, 20 nt, synthetic construct
  source 1..20: mol_type = other RNA
gcgggagcgccagacctcac

SEQ ID NO: 275 - RNA, 20 nt, synthetic construct
  source 1..20: mol_type = other RNA
tgaggtctggcgctcccgct

SEQ ID NO: 276 - RNA, 20 nt, synthetic construct
  source 1..20: mol_type = other RNA
caccaccccgcgggactaga

SEQ ID NO: 277 - RNA, 20 nt, synthetic construct
  source 1..20: mol_type = other RNA
cagctccctctagtcccgcg

SEQ ID NO: 278 - RNA, 20 nt, synthetic construct
  source 1..20: mol_type = other RNA
ctacgagtctgacgggatcg

SEQ ID NO: 279 - RNA, 20 nt, synthetic construct
  source 1..20: mol_type = other RNA
cacgatcccgtcagactcgt

SEQ ID NO: 280 - RNA, 20 nt, synthetic construct
  source 1..20: mol_type = other RNA
ggttcagaccagtactctcg

SEQ ID NO: 281 - DNA, 28 bp, synthetic construct
  source 1..28: mol_type = other DNA
ggcccaaaccgtcttttctctcagaggg

SEQ ID NO: 282 - DNA, 28 bp, synthetic construct
  source 1..28: mol_type = other DNA
ataacaaagacaatcacctcttgaaagg

SEQ ID NO: 283 - DNA, 28 bp, synthetic construct
  source 1..28: mol_type = other DNA
aaacaaacacaggttcccccacccatgg

SEQ ID NO: 284 - DNA, 28 bp, synthetic construct
  source 1..28: mol_type = other DNA
ccacaaaccaaagatactgtaggattgg

SEQ ID NO: 285 - DNA, 28 bp, synthetic construct
  source 1..28: mol_type = other DNA
gccagaaccaatcctacagtatctttgg

SEQ ID NO: 286 - DNA, 28 bp, synthetic construct
  source 1..28: mol_type = other DNA
aggagaagaagagggtgtagacggaggg

SEQ ID NO: 287 - DNA, 28 bp, synthetic construct
  source 1..28: mol_type = other DNA
taacaaagacaatcacctcttgaaaggg

SEQ ID NO: 288 - DNA, 28 bp, synthetic construct
  source 1..28: mol_type = other DNA
aacaaacacaggttcccccacccatggg

SEQ ID NO: 289 - DNA, 28 bp, synthetic construct
  source 1..28: mol_type = other DNA
accaaagatactgtaggattggttctgg

SEQ ID NO: 290 - DNA, 28 bp, synthetic construct
  source 1..28: mol_type = other DNA
ttcagagtcatctcgcccttccccatgg

SEQ ID NO: 291 - DNA, 28 bp, synthetic construct
  source 1..28: mol_type = other DNA
gagtcatctcgcccttccccatgggtgg

SEQ ID NO: 292 - DNA, 28 bp, synthetic construct
  source 1..28: mol_type = other DNA
aggcccaaaccgtcttttctctcagagg

SEQ ID NO: 293 - DNA, 28 bp, synthetic construct
  source 1..28: mol_type = other DNA
acaaacacaggttcccccacccatgggg

SEQ ID NO: 294 - DNA, 28 bp, synthetic construct
  source 1..28: mol_type = other DNA
tcttccaggaaggaaatgcacctatggg

SEQ ID NO: 295 - DNA, 28 bp, synthetic construct
  source 1..28: mol_type = other DNA
gagctcatctgccacagagcgctggggg

SEQ ID NO: 296 - DNA, 28 bp, synthetic construct
  source 1..28: mol_type = other DNA
gaaacccacaaaccaaagatactgtagg

SEQ ID NO: 297 - DNA, 28 bp, synthetic construct
  source 1..28: mol_type = other DNA
ctcttccaggaaggaaatgcacctatgg

SEQ ID NO: 298 - DNA, 28 bp, synthetic construct
  source 1..28: mol_type = other DNA
ccaaaccgtcttttctctcagagggtgg

SEQ ID NO: 299 - DNA, 28 bp, synthetic construct
  source 1..28: mol_type = other DNA
cagcacctctagctgtctgcctcagtgg

SEQ ID NO: 300 - DNA, 28 bp, synthetic construct
  source 1..28: mol_type = other DNA
caaaccgtcttttctctcagagggtggg

SEQ ID NO: 301 - DNA, 28 bp, synthetic construct
  source 1..28: mol_type = other DNA
caatcctacagtatctttggtttgtggg

SEQ ID NO: 302 - DNA, 28 bp, synthetic construct
  source 1..28: mol_type = other DNA
cggagctcatctgccacagagcgctggg

SEQ ID NO: 303 - DNA, 28 bp, synthetic construct
  source 1..28: mol_type = other DNA
agcacctctagctgtctgcctcagtggg

SEQ ID NO: 304 - DNA, 28 bp, synthetic construct
  source 1..28: mol_type = other DNA
tattccttatcctgctgcccctgtaggg

SEQ ID NO: 305 - DNA, 28 bp, synthetic construct
  source 1..28: mol_type = other DNA
ttgtactttattgatgtgttacaggagg

SEQ ID NO: 306 - DNA, 28 bp, synthetic construct
  source 1..28: mol_type = other DNA
gaggagaagaagagggtgtagacggagg

SEQ ID NO: 307 - DNA, 28 bp, synthetic construct
  source 1..28: mol_type = other DNA
tggaagaatcggcacttgatcccatagg

SEQ ID NO: 308 - DNA, 28 bp, synthetic construct
  source 1..28: mol_type = other DNA
agcgagagcacagatgaggcctcattgg

SEQ ID NO: 309 - DNA, 28 bp, synthetic construct
  source 1..28: mol_type = other DNA
cacgtgcccagcgagagcacagatgagg

SEQ ID NO: 310 - DNA, 28 bp, synthetic construct
  source 1..28: mol_type = other DNA
caagtgccgattcttccacccagagcgg

SEQ ID NO: 311 - DNA, 28 bp, synthetic construct
  source 1..28: mol_type = other DNA
gcttggccgctctgggtggaagaatcgg

SEQ ID NO: 312 - DNA, 28 bp, synthetic construct
  source 1..28: mol_type = other DNA
atgaggcctcatctgtgctctcgctggg

SEQ ID NO: 313 - DNA, 28 bp, synthetic construct
  source 1..28: mol_type = other DNA
acggagctcatctgccacagagcgctgg

SEQ ID NO: 314 - DNA, 28 bp, synthetic construct
  source 1..28: mol_type = other DNA
tcagggctgggaatgggctgctcaatgg

SEQ ID NO: 315 - DNA, 28 bp, synthetic construct
  source 1..28: mol_type = other DNA
atggaggagaagaagagggtgtagacgg

SEQ ID NO: 316 - DNA, 28 bp, synthetic construct
  source 1..28: mol_type = other DNA
aatgaggcctcatctgtgctctcgctgg

SEQ ID NO: 317 - DNA, 28 bp, synthetic construct
  source 1..28: mol_type = other DNA
ggaagggcgagatgactctgaataaagg

SEQ ID NO: 318 - DNA, 28 bp, synthetic construct
  source 1..28: mol_type = other DNA
gctctggggggtgagaggagagcattgg

SEQ ID NO: 319 - DNA, 28 bp, synthetic construct
  source 1..28: mol_type = other DNA
tgattgtactttattgatgtgttacagg

SEQ ID NO: 320 - DNA, 28 bp, synthetic construct
  source 1..28: mol_type = other DNA
tctctgtagtttaaggagacgctgccgg

SEQ ID NO: 321 - DNA, 28 bp, synthetic construct
  source 1..28: mol_type = other DNA
tcagagtcatctcgcccttccccatggg

SEQ ID NO: 322 - DNA, 28 bp, synthetic construct
  source 1..28: mol_type = other DNA
ggggggtgagaggagagcattggcacgg

SEQ ID NO: 323 - DNA, 28 bp, synthetic construct
  source 1..28: mol_type = other DNA
cataggtgcatttccttcctggaagagg

SEQ ID NO: 324 - DNA, 28 bp, synthetic construct
  source 1..28: mol_type = other DNA
cacaggttcccccacccatggggaaggg

SEQ ID NO: 325 - DNA, 28 bp, synthetic construct
  source 1..28: mol_type = other DNA
ggagctcatctgccacagagcgctgggg

SEQ ID NO: 326 - DNA, 28 bp, synthetic construct
  source 1..28: mol_type = other DNA
tacaatcattgtgagccctttcaagagg

SEQ ID NO: 327 - DNA, 28 bp, synthetic construct
  source 1..28: mol_type = other DNA
tagagtccctcttgattcctcttccagg

SEQ ID NO: 328 - DNA, 28 bp, synthetic construct
  source 1..28: mol_type = other DNA
ttccttcctggaagaggaatcaagaggg

SEQ ID NO: 329 - DNA, 28 bp, synthetic construct
  source 1..28: mol_type = other DNA
agtcatctcgcccttccccatgggtggg

SEQ ID NO: 330 - DNA, 28 bp, synthetic construct
  source 1..28: mol_type = other DNA
caccctctgagagaaaagacggtttggg

SEQ ID NO: 331 - DNA, 28 bp, synthetic construct
  source 1..28: mol_type = other DNA
gtccctcttgattcctcttccaggaagg

SEQ ID NO: 332 - DNA, 28 bp, synthetic construct
  source 1..28: mol_type = other DNA
ctcaatggcccaaagcccagcctgacgg

SEQ ID NO: 333 - DNA, 28 bp, synthetic construct
  source 1..28: mol_type = other DNA
attccttatcctgctgcccctgtagggg

SEQ ID NO: 334 - DNA, 28 bp, synthetic construct
  source 1..28: mol_type = other DNA
tttccttcctggaagaggaatcaagagg

SEQ ID NO: 335 - DNA, 28 bp, synthetic construct
  source 1..28: mol_type = other DNA
ctttattgatgtgttacaggaggtaagg

SEQ ID NO: 336 - DNA, 28 bp, synthetic construct
  source 1..28: mol_type = other DNA
cgtcttttctctcagagggtggggaggg

SEQ ID NO: 337 - DNA, 28 bp, synthetic construct
  source 1..28: mol_type = other DNA
cacataccgtgacctccaaggcgagcgg

SEQ ID NO: 338 - DNA, 28 bp, synthetic construct
  source 1..28: mol_type = other DNA
tgttcacaccatcacgacgcgtgggtgg

SEQ ID NO: 339 - DNA, 28 bp, synthetic construct
  source 1..28: mol_type = other DNA
cggcaggagtggaagcgcttcatcgagg

SEQ ID NO: 340 - DNA, 28 bp, synthetic construct
  source 1..28: mol_type = other DNA
tgtgaagctggcctacgagtctgacggg

SEQ ID NO: 341 - DNA, 28 bp, synthetic construct
  source 1..28: mol_type = other DNA
cctggtgttcacaccatcacgacgcgtg

SEQ ID NO: 342 - DNA, 28 bp, synthetic construct
  source 1..28: mol_type = other DNA
accgagcgggagcgccagacctcaccgg

SEQ ID NO: 343 - DNA, 28 bp, synthetic construct
  source 1..28: mol_type = other DNA
ccgagcgggagcgccagacctcaccgga

SEQ ID NO: 344 - DNA, 28 bp, synthetic construct
  source 1..28: mol_type = other DNA
ccctctagtcccgcggggtggtggcacc

SEQ ID NO: 345 - DNA, 28 bp, synthetic construct
  source 1..28: mol_type = other DNA
gccctcagctccctctagtcccgcgggg

SEQ ID NO: 346 - DNA, 28 bp, synthetic construct
  source 1..28: mol_type = other DNA
ctggcctacgagtctgacgggatcgtgg

SEQ ID NO: 347 - DNA, 28 bp, synthetic construct
  source 1..28: mol_type = other DNA
cctacgagtctgacgggatcgtggtttc

SEQ ID NO: 348 - DNA, 28 bp, synthetic construct
  source 1..28: mol_type = other DNA
cctcgagagtactggtctgaaccatacc

SEQ ID NO: 349 - RNA, 20 nt, synthetic construct
  source 1..20: mol_type = other RNA
tccctcccgcctcctcgccc

SEQ ID NO: 350 - RNA, 20 nt, synthetic construct
  source 1..20: mol_type = other RNA
ccctcccgcctcctcgccca

SEQ ID NO: 351 - RNA, 20 nt, synthetic construct
  source 1..20: mol_type = other RNA
ccgcctcctcgcccagggcc

SEQ ID NO: 352 - RNA, 20 nt, synthetic construct
  source 1..20: mol_type = other RNA
cgcccagggcccggctcacc

SEQ ID NO: 353 - RNA, 20 nt, synthetic construct
  source 1..20: mol_type = other RNA
gccctgggcgaggaggcggg

SEQ ID NO: 354 - RNA, 20 nt, synthetic construct
  source 1..20: mol_type = other RNA
cgggccctgggcgaggaggc

SEQ ID NO: 355 - RNA, 20 nt, synthetic construct
  source 1..20: mol_type = other RNA
ccgggccctgggcgaggagg

SEQ ID NO: 356 - RNA, 20 nt, synthetic construct
  source 1..20: mol_type = other RNA
gagccgggccctgggcgagg

SEQ ID NO: 357 - RNA, 20 nt, synthetic construct
  source 1..20: mol_type = other RNA
ggtgagccgggccctgggcg

SEQ ID NO: 358 - RNA, 20 nt, synthetic construct
  source 1..20: mol_type = other RNA
cgccaggtgagccgggccct

SEQ ID NO: 359 - RNA, 20 nt, synthetic construct
  source 1..20: mol_type = other RNA
ccgccaggtgagccgggccc

SEQ ID NO: 360 - RNA, 20 nt, synthetic construct
  source 1..20: mol_type = other RNA
gccccgccgccaggtgagcc

SEQ ID NO: 361 - RNA, 20 nt, synthetic construct
  source 1..20: mol_type = other RNA
cgccccgccgccaggtgagc

SEQ ID NO: 362 - RNA, 20 nt, synthetic construct
  source 1..20: mol_type = other RNA
gcgtcccgcgccccgccgcc

SEQ ID NO: 363 - RNA, 20 nt, synthetic construct
  source 1..20: mol_type = other RNA
aggcgggagggaggagggag

SEQ ID NO: 364 - RNA, 20 nt, synthetic construct
  source 1..20: mol_type = other RNA
gaggcgggagggaggaggga

SEQ ID NO: 365 - RNA, 20 nt, synthetic construct
  source 1..20: mol_type = other RNA
ggaggcgggagggaggaggg

SEQ ID NO: 366 - RNA, 20 nt, synthetic construct
  source 1..20: mol_type = other RNA
cgaggaggcgggagggagga

SEQ ID NO: 367 - RNA, 20 nt, synthetic construct
  source 1..20: mol_type = other RNA
gcgaggaggcgggagggagg

SEQ ID NO: 368 - RNA, 20 nt, synthetic construct
  source 1..20: mol_type = other RNA
tgggcgaggaggcgggaggg

SEQ ID NO: 369 - RNA, 20 nt, synthetic construct
  source 1..20: mol_type = other RNA
ccctgggcgaggaggcggga

SEQ ID NO: 370 - RNA, 20 nt, synthetic construct
  source 1..20: mol_type = other RNA
gagctggggcgctgcggggc

SEQ ID NO: 371 - RNA, 20 nt, synthetic construct
  source 1..20: mol_type = other RNA
agctggggcgctgcggggcc

SEQ ID NO: 372 - RNA, 20 nt, synthetic construct
  source 1..20: mol_type = other RNA
ggggcgctgcggggccgggc

SEQ ID NO: 373 - RNA, 20 nt, synthetic construct
  source 1..20: mol_type = other RNA
gcgctgcgggagagacaaag

SEQ ID NO: 374 - RNA, 20 nt, synthetic construct
  source 1..20: mol_type = other RNA
ggagagacaaagaggtgagc

SEQ ID NO: 375 - RNA, 20 nt, synthetic construct
  source 1..20: mol_type = other RNA
gagagacaaagaggtgagct

SEQ ID NO: 376 - RNA, 20 nt, synthetic construct
  source 1..20: mol_type = other RNA
agagacaaagaggtgagctg

SEQ ID NO: 377 - RNA, 20 nt, synthetic construct
  source 1..20: mol_type = other RNA
agaggtgagctggggcgctg

SEQ ID NO: 378 - RNA, 20 nt, synthetic construct
  source 1..20: mol_type = other RNA
gaggtgagctggggcgctgc

SEQ ID NO: 379 - RNA, 20 nt, synthetic construct
  source 1..20: mol_type = other RNA
aggtgagctggggcgctgcg

SEQ ID NO: 380 - RNA, 20 nt, synthetic construct
  source 1..20: mol_type = other RNA
tagcgtccgggggtgcgctg

SEQ ID NO: 381 - RNA, 20 nt, synthetic construct
  source 1..20: mol_type = other RNA
agcgtccgggggtgcgctgc

SEQ ID NO: 382 - RNA, 20 nt, synthetic construct
  source 1..20: mol_type = other RNA
ccggccggcgcacacctgcc

SEQ ID NO: 383 - RNA, 20 nt, synthetic construct
  source 1..20: mol_type = other RNA
gaggggtgggccatagcgtc

SEQ ID NO: 384 - RNA, 20 nt, synthetic construct
  source 1..20: mol_type = other RNA
aggggtgggccatagcgtcc

SEQ ID NO: 385 - RNA, 20 nt, synthetic construct
  source 1..20: mol_type = other RNA
ggggtgggccatagcgtccg

SEQ ID NO: 386 - RNA, 20 nt, synthetic construct
  source 1..20: mol_type = other RNA
gggtgggccatagcgtccgg

SEQ ID NO: 387 - RNA, 20 nt, synthetic construct
  source 1..20: mol_type = other RNA
ctatggcccacccctccggc

SEQ ID NO: 388 - RNA, 20 nt, synthetic construct
  source 1..20: mol_type = other RNA
gacgctatggcccacccctc

SEQ ID NO: 389 - RNA, 20 nt, synthetic construct
  source 1..20: mol_type = other RNA
cagcgcacccccggacgcta

SEQ ID NO: 390 - RNA, 20 nt, synthetic construct
  source 1..20: mol_type = other RNA
tctctcccgcagcgcacccc

SEQ ID NO: 391 - RNA, 20 nt, synthetic construct
  source 1..20: mol_type = other RNA
cggcgtgcgaacggaatgtg

SEQ ID NO: 392 - RNA, 20 nt, synthetic construct
  source 1..20: mol_type = other RNA
gggcccccagtagaatccgc

SEQ ID NO: 393 - RNA, 19 nt, synthetic construct
  source 1..19: mol_type = other RNA
acgcctgcggattctactg

SEQ ID NO: 394 - RNA, 19 nt, synthetic construct
  source 1..19: mol_type = other RNA
gacgcctgcggattctact

SEQ ID NO: 395 - RNA, 19 nt, synthetic construct
  source 1..19: mol_type = other RNA
ggacgcctgcggattctac

SEQ ID NO: 396 - RNA, 19 nt, synthetic construct
  source 1..19: mol_type = other RNA
gcgcgctcctggacgcctg

SEQ ID NO: 397 - RNA, 19 nt, synthetic construct
  source 1..19: mol_type = other RNA
aggatggtagcacacaacc

SEQ ID NO: 398 - RNA, 19 nt, synthetic construct
  source 1..19: mol_type = other RNA
cgtcggggctctgctgctg

SEQ ID NO: 399 - DNA, 28 bp, synthetic construct
  source 1..28: mol_type = other DNA
cctcctccctcccgcctcctcgcccagg

SEQ ID NO: 400 - DNA, 28 bp, synthetic construct
  source 1..28: mol_type = other DNA
ctcctccctcccgcctcctcgcccaggg

SEQ ID NO: 401 - DNA, 28 bp, synthetic construct
  source 1..28: mol_type = other DNA
ccctcccgcctcctcgcccagggcccgg

SEQ ID NO: 402 - DNA, 28 bp, synthetic construct
  source 1..28: mol_type = other DNA
ctcctcgcccagggcccggctcacctgg

SEQ ID NO: 403 - DNA, 28 bp, synthetic construct
  source 1..28: mol_type = other DNA
gccgggccctgggcgaggaggcgggagg

SEQ ID NO: 404 - DNA, 28 bp, synthetic construct
  source 1..28: mol_type = other DNA
tgagccgggccctgggcgaggaggcggg

SEQ ID NO: 405 - DNA, 28 bp, synthetic construct
  source 1..28: mol_type = other DNA
gtgagccgggccctgggcgaggaggcgg

SEQ ID NO: 406 - DNA, 28 bp, synthetic construct
  source 1..28: mol_type = other DNA
caggtgagccgggccctgggcgaggagg

SEQ ID NO: 407 - DNA, 28 bp, synthetic construct
  source 1..28: mol_type = other DNA
cgccaggtgagccgggccctgggcgagg

SEQ ID NO: 408 - DNA, 28 bp, synthetic construct
  source 1..28: mol_type = other DNA
cccgccgccaggtgagccgggccctggg

SEQ ID NO: 409 - DNA, 28 bp, synthetic construct
  source 1..28: mol_type = other DNA
ccccgccgccaggtgagccgggccctgg

SEQ ID NO: 410 - DNA, 28 bp, synthetic construct
  source 1..28: mol_type = other DNA
cccgcgccccgccgccaggtgagccggg

SEQ ID NO: 411 - DNA, 28 bp, synthetic construct
  source 1..28: mol_type = other DNA
tcccgcgccccgccgccaggtgagccgg

SEQ ID NO: 412 - DNA, 28 bp, synthetic construct
  source 1..28: mol_type = other DNA
ccgcggcgtcccgcgccccgccgccagg

SEQ ID NO: 413 - DNA, 28 bp, synthetic construct
  source 1..28: mol_type = other DNA
cgaggaggcgggagggaggagggagggg

SEQ ID NO: 414 - DNA, 28 bp, synthetic construct
  source 1..28: mol_type = other DNA
gcgaggaggcgggagggaggagggaggg

SEQ ID NO: 415 - DNA, 28 bp, synthetic construct
  source 1..28: mol_type = other DNA
ggcgaggaggcgggagggaggagggagg

SEQ ID NO: 416 - DNA, 28 bp, synthetic construct
  source 1..28: mol_type = other DNA
ctgggcgaggaggcgggagggaggaggg

SEQ ID NO: 417 - DNA, 28 bp, synthetic construct
  source 1..28: mol_type = other DNA
cctgggcgaggaggcgggagggaggagg

SEQ ID NO: 418 - DNA, 28 bp, synthetic construct
  source 1..28: mol_type = other DNA
ggccctgggcgaggaggcgggagggagg

SEQ ID NO: 419 - DNA, 28 bp, synthetic construct
  source 1..28: mol_type = other DNA
ccgggccctgggcgaggaggcgggaggg

SEQ ID NO: 420 - DNA, 28 bp, synthetic construct
  source 1..28: mol_type = other DNA
gaggtgagctggggcgctgcggggccgg

SEQ ID NO: 421 - DNA, 28 bp, synthetic construct
  source 1..28: mol_type = other DNA
aggtgagctggggcgctgcggggccggg

SEQ ID NO: 422 - DNA, 28 bp, synthetic construct
  source 1..28: mol_type = other DNA
gagctggggcgctgcggggccgggcagg

SEQ ID NO: 423 - DNA, 28 bp, synthetic construct
  source 1..28: mol_type = other DNA
ggggtgcgctgcgggagagacaaagagg

SEQ ID NO: 424 - DNA, 28 bp, synthetic construct
  source 1..28: mol_type = other DNA
ctgcgggagagacaaagaggtgagctgg

SEQ ID NO: 425 - DNA, 28 bp, synthetic construct
  source 1..28: mol_type = other DNA
tgcgggagagacaaagaggtgagctggg

SEQ ID NO: 426 - DNA, 28 bp, synthetic construct
  source 1..28: mol_type = other DNA
gcgggagagacaaagaggtgagctgggg

SEQ ID NO: 427 - DNA, 28 bp, synthetic construct
  source 1..28: mol_type = other DNA
gacaaagaggtgagctggggcgctgcgg

SEQ ID NO: 428 - DNA, 28 bp, synthetic construct
  source 1..28: mol_type = other DNA
acaaagaggtgagctggggcgctgcggg

SEQ ID NO: 429 - DNA, 28 bp, synthetic construct
  source 1..28: mol_type = other DNA
caaagaggtgagctggggcgctgcgggg

SEQ ID NO: 430 - DNA, 28 bp, synthetic construct
  source 1..28: mol_type = other DNA
ggccatagcgtccgggggtgcgctgcgg

SEQ ID NO: 431 - DNA, 28 bp, synthetic construct
  source 1..28: mol_type = other DNA
gccatagcgtccgggggtgcgctgcggg

SEQ ID NO: 432 - DNA, 28 bp, synthetic construct
  source 1..28: mol_type = other DNA
gttgtccggccggcgcacacctgcccgg

SEQ ID NO: 433 - DNA, 28 bp, synthetic construct
  source 1..28: mol_type = other DNA
agccggaggggtgggccatagcgtccgg

SEQ ID NO: 434 - DNA, 28 bp, synthetic construct
  source 1..28: mol_type = other DNA
gccggaggggtgggccatagcgtccggg

SEQ ID NO: 435 - DNA, 28 bp, synthetic construct
  source 1..28: mol_type = other DNA
ccggaggggtgggccatagcgtccgggg

SEQ ID NO: 436 - DNA, 28 bp, synthetic construct
  source 1..28: mol_type = other DNA
cggaggggtgggccatagcgtccggggg

SEQ ID NO: 437 - DNA, 28 bp, synthetic construct
  source 1..28: mol_type = other DNA
ggacgctatggcccacccctccggctgg

SEQ ID NO: 438 - DNA, 28 bp, synthetic construct
  source 1..28: mol_type = other DNA
ccccggacgctatggcccacccctccgg

SEQ ID NO: 439 - DNA, 28 bp, synthetic construct
  source 1..28: mol_type = other DNA
tcccgcagcgcacccccggacgctatgg

SEQ ID NO: 440 - DNA, 28 bp, synthetic construct
  source 1..28: mol_type = other DNA
ctttgtctctcccgcagcgcacccccgg

SEQ ID NO: 441 - DNA, 28 bp, synthetic construct
  source 1..28: mol_type = other DNA
gtaatcggcgtgcgaacggaatgtgcgg

SEQ ID NO: 442 - DNA, 28 bp, synthetic construct
  source 1..28: mol_type = other DNA
ctcaggggcccccagtagaatccgcagg

SEQ ID NO: 443 - DNA, 28 bp, synthetic construct
  source 1..28: mol_type = other DNA
tcctggacgcctgcggattctactgggg

SEQ ID NO: 444 - DNA, 28 bp, synthetic construct
  source 1..28: mol_type = other DNA
ctcctggacgcctgcggattctactggg

SEQ ID NO: 445 - DNA, 28 bp, synthetic construct
  source 1..28: mol_type = other DNA
gctcctggacgcctgcggattctactgg

SEQ ID NO: 446 - DNA, 28 bp, synthetic construct
  source 1..28: mol_type = other DNA
gcgccagcgcgctcctggacgcctgcgg

SEQ ID NO: 447 - DNA, 28 bp, synthetic construct
  source 1..28: mol_type = other DNA
ttctgtaggatggtagcacacaaccagg

SEQ ID NO: 448 - DNA, 28 bp, synthetic construct
  source 1..28: mol_type = other DNA
ggccgccgtcggggctctgctgctgtgg

SEQ ID NO: 449 - RNA, 20 nt, synthetic construct
  source 1..20: mol_type = other RNA
aaattctcggaggatgctcc

SEQ ID NO: 450 - RNA, 20 nt, synthetic construct
  source 1..20: mol_type = other RNA
aacagagagggaagagctga

SEQ ID NO: 451 - RNA, 20 nt, synthetic construct
  source 1..20: mol_type = other RNA
aacctggacctgaaatttgg

SEQ ID NO: 452 - RNA, 20 nt, synthetic construct
  source 1..20: mol_type = other RNA
aactggttcccacagctctt

SEQ ID NO: 453 - RNA, 20 nt, synthetic construct
  source 1..20: mol_type = other RNA
aaggagaccgatgcttgctc

SEQ ID NO: 454 - RNA, 20 nt, synthetic construct
  source 1..20: mol_type = other RNA
aatggaactggacctgggca

SEQ ID NO: 455 - RNA, 20 nt, synthetic construct
  source 1..20: mol_type = other RNA
acgtagactaagttgaccct

SEQ ID NO: 456 - RNA, 20 nt, synthetic construct
  source 1..20: mol_type = other RNA
actctatctcctaagagctg

SEQ ID NO: 457 - RNA, 20 nt, synthetic construct
  source 1..20: mol_type = other RNA
agaccctttgtagcgtggtc

SEQ ID NO: 458 - RNA, 20 nt, synthetic construct
  source 1..20: mol_type = other RNA
agacctgaccacgctacaaa

SEQ ID NO: 459 - RNA, 20 nt, synthetic construct
  source 1..20: mol_type = other RNA
agagaaatggaactggacct

SEQ ID NO: 460 - RNA, 20 nt, synthetic construct
  source 1..20: mol_type = other RNA
agagggttatgcctttgaag

SEQ ID NO: 461 - RNA, 20 nt, synthetic construct
  source 1..20: mol_type = other RNA
agatgaggactcacaggcct

SEQ ID NO: 462 - RNA, 20 nt, synthetic construct
  source 1..20: mol_type = other RNA
agatgcagagattttgctgg

SEQ ID NO: 463 - RNA, 20 nt, synthetic construct
  source 1..20: mol_type = other RNA
agcagcttgagaagaggctt

SEQ ID NO: 464 - RNA, 20 nt, synthetic construct
  source 1..20: mol_type = other RNA
agcatccctcaaagtaatgc

SEQ ID NO: 465 - RNA, 20 nt, synthetic construct
  source 1..20: mol_type = other RNA
agcgactgctcgttgatgtc

SEQ ID NO: 466 - RNA, 20 nt, synthetic construct
  source 1..20: mol_type = other RNA
agctggttatgtccctggag

SEQ ID NO: 467 - RNA, 20 nt, synthetic construct
  source 1..20: mol_type = other RNA
atgtttgggttgggtgagaa

SEQ ID NO: 468 - RNA, 20 nt, synthetic construct
  source 1..20: mol_type = other RNA
attctcatgtctgtcatccc

SEQ ID NO: 469 - RNA, 20 nt, synthetic construct
  source 1..20: mol_type = other RNA
caaattctcggaggatgctc

SEQ ID NO: 470 - RNA, 20 nt, synthetic construct
  source 1..20: mol_type = other RNA
cacgtagactaagttgaccc

SEQ ID NO: 471 - RNA, 20 nt, synthetic construct
  source 1..20: mol_type = other RNA
cagacctgaccacgctacaa

SEQ ID NO: 472 - RNA, 20 nt, synthetic construct
  source 1..20: mol_type = other RNA
catgtcctttcaggtcctga

SEQ ID NO: 473 - RNA, 20 nt, synthetic construct
  source 1..20: mol_type = other RNA
cgttgcactgttgagtgtca

SEQ ID NO: 474 - RNA, 20 nt, synthetic construct
  source 1..20: mol_type = other RNA
ctccagaacatgtttgggtt

SEQ ID NO: 475 - RNA, 20 nt, synthetic construct
  source 1..20: mol_type = other RNA
ctctatctcctaagagctgt

SEQ ID NO: 476 - RNA, 20 nt, synthetic construct
  source 1..20: mol_type = other RNA
ctggacctgaaatttggggg

SEQ ID NO: 477 - RNA, 20 nt, synthetic construct
  source 1..20: mol_type = other RNA
gaaagcagctactacagatg

SEQ ID NO: 478 - RNA, 20 nt, synthetic construct
  source 1..20: mol_type = other RNA
gacccttttaagttgcagtg

SEQ ID NO: 479 - RNA, 20 nt, synthetic construct
  source 1..20: mol_type = other RNA
gactaagttgaccctgggag

SEQ ID NO: 480 - RNA, 20 nt, synthetic construct
  source 1..20: mol_type = other RNA
gagagaaatggaactggacc

SEQ ID NO: 481 - RNA, 20 nt, synthetic construct
  source 1..20: mol_type = other RNA
gagctggttatgtccctgga

SEQ ID NO: 482 - RNA, 20 nt, synthetic construct
  source 1..20: mol_type = other RNA
gaggagggaaggcaaattct

SEQ ID NO: 483 - RNA, 20 nt, synthetic construct
  source 1..20: mol_type = other RNA
gagggaaggcaaattctcgg

SEQ ID NO: 484 - RNA, 20 nt, synthetic construct
  source 1..20: mol_type = other RNA
gatgaggactcacaggcctt

SEQ ID NO: 485 - RNA, 20 nt, synthetic construct
  source 1..20: mol_type = other RNA
gatgtggacagcaagagagt

SEQ ID NO: 486 - RNA, 20 nt, synthetic construct
  source 1..20: mol_type = other RNA
gcagagattttgctggaggc

SEQ ID NO: 487 - RNA, 20 nt, synthetic construct
  source 1..20: mol_type = other RNA
ggaaccagttcatattgcag

SEQ ID NO: 488 - RNA, 20 nt, synthetic construct
  source 1..20: mol_type = other RNA
ggctctcttcacctcttcaa

SEQ ID NO: 489 - RNA, 20 nt, synthetic construct
  source 1..20: mol_type = other RNA
ggctgctatagatttagacg

SEQ ID NO: 490 - RNA, 20 nt, synthetic construct
  source 1..20: mol_type = other RNA
ggctttcatggtatgagatg

SEQ ID NO: 491 - RNA, 20 nt, synthetic construct
  source 1..20: mol_type = other RNA
gggcaaaagggaaacagaga

SEQ ID NO: 492 - RNA, 20 nt, synthetic construct
  source 1..20: mol_type = other RNA
gggcacatgtcactttgcaa

SEQ ID NO: 493 - RNA, 20 nt, synthetic construct
  source 1..20: mol_type = other RNA
ggtatgagatgaggactcac

SEQ ID NO: 494 - RNA, 20 nt, synthetic construct
  source 1..20: mol_type = other RNA
gtctgtgaagaacacagtac

SEQ ID NO: 495 - RNA, 20 nt, synthetic construct
  source 1..20: mol_type = other RNA
gtggacagcaagagagttgg

SEQ ID NO: 496 - RNA, 20 nt, synthetic construct
  source 1..20: mol_type = other RNA
gttgagtgtcaaggctactg

SEQ ID NO: 497 - RNA, 20 nt, synthetic construct
  source 1..20: mol_type = other RNA
tagcagcttgagaagaggct

SEQ ID NO: 498 - RNA, 20 nt, synthetic construct
  source 1..20: mol_type = other RNA
tcaggtactacctgttgacc

SEQ ID NO: 499 - RNA, 20 nt, synthetic construct
  source 1..20: mol_type = other RNA
tcctttcaggtcctgaaggc

SEQ ID NO: 500 - RNA, 20 nt, synthetic construct
  source 1..20: mol_type = other RNA
tcgacatcctgagcaagcat

SEQ ID NO: 501 - RNA, 20 nt, synthetic construct
  source 1..20: mol_type = other RNA
tctcaagctgctacacgagg

SEQ ID NO: 502 - RNA, 20 nt, synthetic construct
  source 1..20: mol_type = other RNA
tctcatgtctgtcatcccag

SEQ ID NO: 503 - RNA, 20 nt, synthetic construct
  source 1..20: mol_type = other RNA
tctccagaacatgtttgggt

SEQ ID NO: 504 - RNA, 20 nt, synthetic construct
  source 1..20: mol_type = other RNA
tctgatagacaaagcctgga

SEQ ID NO: 505 - RNA, 20 nt, synthetic construct
  source 1..20: mol_type = other RNA
tctgtctgatagacaaagcc

SEQ ID NO: 506 - RNA, 20 nt, synthetic construct
  source 1..20: mol_type = other RNA
tcttctcaagctgctacacg

SEQ ID NO: 507 - RNA, 20 nt, synthetic construct
  source 1..20: mol_type = other RNA
tgagctggttatgtccctgg

SEQ ID NO: 508 - RNA, 20 nt, synthetic construct
  source 1..20: mol_type = other RNA
tggacagcaagagagttggt

SEQ ID NO: 509 - RNA, 20 nt, synthetic construct
  source 1..20: mol_type = other RNA
tggacctgaaatttgggggt

SEQ ID NO: 510 - RNA, 20 nt, synthetic construct
  source 1..20: mol_type = other RNA
tgggcaaaagggaaacagag

SEQ ID NO: 511 - RNA, 20 nt, synthetic construct
  source 1..20: mol_type = other RNA
tgggtgagaagggttgatat

SEQ ID NO: 512 - RNA, 20 nt, synthetic construct
  source 1..20: mol_type = other RNA
ttcacagaccctttgtagcg

SEQ ID NO: 513 - RNA, 20 nt, synthetic construct
  source 1..20: mol_type = other RNA
ttctgagctggttatgtccc

SEQ ID NO: 514 - RNA, 20 nt, synthetic construct
  source 1..20: mol_type = other RNA
tttacagttgtgacacccct

SEQ ID NO: 515 - RNA, 20 nt, synthetic construct
  source 1..20: mol_type = other RNA
tttagacgtggggatactgg

SEQ ID NO: 516 - RNA, 20 nt, synthetic construct
  source 1..20: mol_type = other RNA
tttgagggatgctgaatgag

SEQ ID NO: 517 - RNA, 20 nt, synthetic construct
  source 1..20: mol_type = other RNA
ttttacagttgtgacacccc

SEQ ID NO: 518 - RNA, 20 nt, synthetic construct
  source 1..20: mol_type = other RNA
ttccgcaaaatagagcccca

SEQ ID NO: 519 - RNA, 20 nt, synthetic construct
  source 1..20: mol_type = other RNA
tgcacagaactatcgtacca

SEQ ID NO: 520 - DNA, 28 bp, synthetic construct
  source 1..28: mol_type = other DNA
aaggcaaattctcggaggatgctccggg

SEQ ID NO: 521 - DNA, 28 bp, synthetic construct
  source 1..28: mol_type = other DNA
agggaaacagagagggaagagctgaagg

SEQ ID NO: 522 - DNA, 28 bp, synthetic construct
  source 1..28: mol_type = other DNA
tagcaaacctggacctgaaatttggggg

SEQ ID NO: 523 - DNA, 28 bp, synthetic construct
  source 1..28: mol_type = other DNA
atatgaactggttcccacagctcttagg

SEQ ID NO: 524 - DNA, 28 bp, synthetic construct
  source 1..28: mol_type = other DNA
tctcaaaggagaccgatgcttgctcagg

SEQ ID NO: 525 - DNA, 28 bp, synthetic construct
  source 1..28: mol_type = other DNA
agagaaatggaactggacctgggcaagg

SEQ ID NO: 526 - DNA, 28 bp, synthetic construct
  source 1..28: mol_type = other DNA
aagacacgtagactaagttgaccctggg

SEQ ID NO: 527 - DNA, 28 bp, synthetic construct
  source 1..28: mol_type = other DNA
attacactctatctcctaagagctgtgg

SEQ ID NO: 528 - DNA, 28 bp, synthetic construct
  source 1..28: mol_type = other DNA
ttcacagaccctttgtagcgtggtcagg

SEQ ID NO: 529 - DNA, 28 bp, synthetic construct
  source 1..28: mol_type = other DNA
acagcagacctgaccacgctacaaaggg

SEQ ID NO: 530 - DNA, 28 bp, synthetic construct
  source 1..28: mol_type = other DNA
gaatgagagaaatggaactggacctggg

SEQ ID NO: 531 - DNA, 28 bp, synthetic construct
  source 1..28: mol_type = other DNA
atgggagagggttatgcctttgaagagg

SEQ ID NO: 532 - DNA, 28 bp, synthetic construct
  source 1..28: mol_type = other DNA
gtatgagatgaggactcacaggccttgg

SEQ ID NO: 533 - DNA, 28 bp, synthetic construct
  source 1..28: mol_type = other DNA
gtacaagatgcagagattttgctggagg

SEQ ID NO: 534 - DNA, 28 bp, synthetic construct
  source 1..28: mol_type = other DNA
cgtgtagcagcttgagaagaggcttggg

SEQ ID NO: 535 - DNA, 28 bp, synthetic construct
  source 1..28: mol_type = other DNA
cattcagcatccctcaaagtaatgcagg

SEQ ID NO: 536 - DNA, 28 bp, synthetic construct
  source 1..28: mol_type = other DNA
gtaaaagcgactgctcgttgatgtctgg

SEQ ID NO: 537 - DNA, 28 bp, synthetic construct
  source 1..28: mol_type = other DNA
ttctgagctggttatgtccctggagggg

SEQ ID NO: 538 - DNA, 28 bp, synthetic construct
  source 1..28: mol_type = other DNA
agaacatgtttgggttgggtgagaaggg

SEQ ID NO: 539 - DNA, 28 bp, synthetic construct
  source 1..28: mol_type = other DNA
tccatattctcatgtctgtcatcccagg

SEQ ID NO: 540 - DNA, 28 bp, synthetic construct
  source 1..28: mol_type = other DNA
gaaggcaaattctcggaggatgctccgg

SEQ ID NO: 541 - DNA, 28 bp, synthetic construct
  source 1..28: mol_type = other DNA
aaagacacgtagactaagttgaccctgg

SEQ ID NO: 542 - DNA, 28 bp, synthetic construct
  source 1..28: mol_type = other DNA
tacagcagacctgaccacgctacaaagg

SEQ ID NO: 543 - DNA, 28 bp, synthetic construct
  source 1..28: mol_type = other DNA
tcagtcatgtcctttcaggtcctgaagg

SEQ ID NO: 544 - DNA, 28 bp, synthetic construct
  source 1..28: mol_type = other DNA
ctcttcgttgcactgttgagtgtcaagg

SEQ ID NO: 545 - DNA, 28 bp, synthetic construct
  source 1..28: mol_type = other DNA
tctatctccagaacatgtttgggttggg

SEQ ID NO: 546 - DNA, 28 bp, synthetic construct
  source 1..28: mol_type = other DNA
ttacactctatctcctaagagctgtggg

SEQ ID NO: 547 - DNA, 28 bp, synthetic construct
  source 1..28: mol_type = other DNA
caaacctggacctgaaatttgggggtgg

SEQ ID NO: 548 - DNA, 28 bp, synthetic construct
  source 1..28: mol_type = other DNA
tattagaaagcagctactacagatgtgg

SEQ ID NO: 549 - DNA, 28 bp, synthetic construct
  source 1..28: mol_type = other DNA
aatgggacccttttaagttgcagtgagg

SEQ ID NO: 550 - DNA, 28 bp, synthetic construct
  source 1..28: mol_type = other DNA
acgtagactaagttgaccctgggagagg

SEQ ID NO: 551 - DNA, 28 bp, synthetic construct
  source 1..28: mol_type = other DNA
tgaatgagagaaatggaactggacctgg

SEQ ID NO: 552 - DNA, 28 bp, synthetic construct
  source 1..28: mol_type = other DNA
gttctgagctggttatgtccctggaggg

SEQ ID NO: 553 - DNA, 28 bp, synthetic construct
  source 1..28: mol_type = other DNA
tactggaggagggaaggcaaattctcgg

SEQ ID NO: 554 - DNA, 28 bp, synthetic construct
  source 1..28: mol_type = other DNA
tggaggagggaaggcaaattctcggagg

SEQ ID NO: 555 - DNA, 28 bp, synthetic construct
  source 1..28: mol_type = other DNA
tatgagatgaggactcacaggccttggg

SEQ ID NO: 556 - DNA, 28 bp, synthetic construct
  source 1..28: mol_type = other DNA
ctgttgatgtggacagcaagagagttgg

SEQ ID NO: 557 - DNA, 28 bp, synthetic construct
  source 1..28: mol_type = other DNA
aagatgcagagattttgctggaggctgg

SEQ ID NO: 558 - DNA, 28 bp, synthetic construct
  source 1..28: mol_type = other DNA
ctgtgggaaccagttcatattgcagtgg

SEQ ID NO: 559 - DNA, 28 bp, synthetic construct
  source 1..28: mol_type = other DNA
tctaaggctctcttcacctcttcaaagg

SEQ ID NO: 560 - DNA, 28 bp, synthetic construct
  source 1..28: mol_type = other DNA
gttctggctgctatagatttagacgtgg

SEQ ID NO: 561 - DNA, 28 bp, synthetic construct
  source 1..28: mol_type = other DNA
agtctggctttcatggtatgagatgagg

SEQ ID NO: 562 - DNA, 28 bp, synthetic construct
  source 1..28: mol_type = other DNA
aatgtgggcaaaagggaaacagagaggg

SEQ ID NO: 563 - DNA, 28 bp, synthetic construct
  source 1..28: mol_type = other DNA
aaaaagggcacatgtcactttgcaaagg

SEQ ID NO: 564 - DNA, 28 bp, synthetic construct
  source 1..28: mol_type = other DNA
ttcatggtatgagatgaggactcacagg

SEQ ID NO: 565 - DNA, 28 bp, synthetic construct
  source 1..28: mol_type = other DNA
aaagggtctgtgaagaacacagtacagg

SEQ ID NO: 566 - DNA, 28 bp, synthetic construct
  source 1..28: mol_type = other DNA
ttgatgtggacagcaagagagttggtgg

SEQ ID NO: 567 - DNA, 28 bp, synthetic construct
  source 1..28: mol_type = other DNA
gcactgttgagtgtcaaggctactgtgg

SEQ ID NO: 568 - DNA, 28 bp, synthetic construct
  source 1..28: mol_type = other DNA
tcgtgtagcagcttgagaagaggcttgg

SEQ ID NO: 569 - DNA, 28 bp, synthetic construct
  source 1..28: mol_type = other DNA
ataattcaggtactacctgttgacctgg

SEQ ID NO: 570 - DNA, 28 bp, synthetic construct
  source 1..28: mol_type = other DNA
tcatgtcctttcaggtcctgaaggcagg

SEQ ID NO: 571 - DNA, 28 bp, synthetic construct
  source 1..28: mol_type = other DNA
agctgtcgacatcctgagcaagcatcgg

SEQ ID NO: 572 - DNA, 28 bp, synthetic construct
  source 1..28: mol_type = other DNA
cctcttctcaagctgctacacgaggagg

SEQ ID NO: 573 - DNA, 28 bp, synthetic construct
  source 1..28: mol_type = other DNA
catattctcatgtctgtcatcccagggg

SEQ ID NO: 574 - DNA, 28 bp, synthetic construct
  source 1..28: mol_type = other DNA
ttctatctccagaacatgtttgggttgg

SEQ ID NO: 575 - DNA, 28 bp, synthetic construct
  source 1..28: mol_type = other DNA
gtctgtctgatagacaaagcctggaagg

SEQ ID NO: 576 - DNA, 28 bp, synthetic construct
  source 1..28: mol_type = other DNA
caaagtctgtctgatagacaaagcctgg

SEQ ID NO: 577 - DNA, 28 bp, synthetic construct
  source 1..28: mol_type = other DNA
aagcctcttctcaagctgctacacgagg

SEQ ID NO: 578 - DNA, 28 bp, synthetic construct
  source 1..28: mol_type = other DNA
ggttctgagctggttatgtccctggagg

SEQ ID NO: 579 - DNA, 28 bp, synthetic construct
  source 1..28: mol_type = other DNA
tgatgtggacagcaagagagttggtggg

SEQ ID NO: 580 - DNA, 28 bp, synthetic construct
  source 1..28: mol_type = other DNA
aaacctggacctgaaatttgggggtggg

SEQ ID NO: 581 - DNA, 28 bp, synthetic construct
  source 1..28: mol_type = other DNA
caatgtgggcaaaagggaaacagagagg

SEQ ID NO: 582 - DNA, 28 bp, synthetic construct
  source 1..28: mol_type = other DNA
tgggttgggtgagaagggttgatattgg

SEQ ID NO: 583 - DNA, 28 bp, synthetic construct
  source 1..28: mol_type = other DNA
tgttcttcacagaccctttgtagcgtgg

SEQ ID NO: 584 - DNA, 28 bp, synthetic construct
  source 1..28: mol_type = other DNA
gatggttctgagctggttatgtccctgg

SEQ ID NO: 585 - DNA, 28 bp, synthetic construct
  source 1..28: mol_type = other DNA
agatttttacagttgtgacacccctggg

SEQ ID NO: 586 - DNA, 28 bp, synthetic construct
  source 1..28: mol_type = other DNA
atagatttagacgtggggatactggagg

SEQ ID NO: 587 - DNA, 28 bp, synthetic construct
  source 1..28: mol_type = other DNA
attactttgagggatgctgaatgagagg

SEQ ID NO: 588 - DNA, 28 bp, synthetic construct
  source 1..28: mol_type = other DNA
tagatttttacagttgtgacacccctgg

SEQ ID NO: 589 - DNA, 28 bp, synthetic construct
  source 1..28: mol_type = other DNA
tccaattccgcaaaatagagccccaagg

SEQ ID NO: 590 - DNA, 28 bp, synthetic construct
  source 1..28: mol_type = other DNA
caccttgcacagaactatcgtaccatgg

SEQ ID NO: 591 - RNA, 20 nt, synthetic construct
  source 1..20: mol_type = other RNA
aaaaggagaaatacaatttg

SEQ ID NO: 592 - RNA, 20 nt, synthetic construct
  source 1..20: mol_type = other RNA
aaaaaggagaaatacaattt

SEQ ID NO: 593 - RNA, 20 nt, synthetic construct
  source 1..20: mol_type = other RNA
aaaaaaggagaaatacaatt

SEQ ID NO: 594 - RNA, 20 nt, synthetic construct
  source 1..20: mol_type = other RNA
ttctcctttttttcataaga

SEQ ID NO: 595 - RNA, 20 nt, synthetic construct
  source 1..20: mol_type = other RNA
aatgccttcttatgaaaaaa

SEQ ID NO: 596 - RNA, 20 nt, synthetic construct
  source 1..20: mol_type = other RNA
agagaaggagagagtataga

SEQ ID NO: 597 - RNA, 20 nt, synthetic construct
  source 1..20: mol_type = other RNA
gaaggaaagaaaagaagaga

SEQ ID NO: 598 - RNA, 20 nt, synthetic construct
  source 1..20: mol_type = other RNA
aattttcttggtgaatcaga

SEQ ID NO: 599 - RNA, 20 nt, synthetic construct
  source 1..20: mol_type = other RNA
ttcaccaagaaaattgtcat

SEQ ID NO: 600 - RNA, 20 nt, synthetic construct
  source 1..20: mol_type = other RNA
aagaccaatgacaattttct

SEQ ID NO: 601 - RNA, 20 nt, synthetic construct
  source 1..20: mol_type = other RNA
tccatgtgttacataataga

SEQ ID NO: 602 - RNA, 20 nt, synthetic construct
  source 1..20: mol_type = other RNA
ccatgtgttacataatagaa

SEQ ID NO: 603 - RNA, 20 nt, synthetic construct
  source 1..20: mol_type = other RNA
catgtgttacataatagaag

SEQ ID NO: 604 - RNA, 20 nt, synthetic construct
  source 1..20: mol_type = other RNA
cccttctattatgtaacaca

SEQ ID NO: 605 - RNA, 20 nt, synthetic construct
  source 1..20: mol_type = other RNA
ttacataatagaaggggaaa

SEQ ID NO: 606 - RNA, 20 nt, synthetic construct
  source 1..20: mol_type = other RNA
taatagaaggggaaaaggca

SEQ ID NO: 607 - RNA, 20 nt, synthetic construct
  source 1..20: mol_type = other RNA
aatagaaggggaaaaggcaa

SEQ ID NO: 608 - RNA, 20 nt, synthetic construct
  source 1..20: mol_type = other RNA
caacacagcgctgatttaga

SEQ ID NO: 609 - RNA, 20 nt, synthetic construct
  source 1..20: mol_type = other RNA
cacagcgctgatttagaagg

SEQ ID NO: 610 - RNA, 20 nt, synthetic construct
  source 1..20: mol_type = other RNA
cttctaaatcagcgctgtgt

SEQ ID NO: 611 - RNA, 20 nt, synthetic construct
  source 1..20: mol_type = other RNA
cgctgatttagaaggtggaa

SEQ ID NO: 612 - RNA, 20 nt, synthetic construct
  source 1..20: mol_type = other RNA
aaaggacagtaaagaccgcc

SEQ ID NO: 613 - RNA, 20 nt, synthetic construct
  source 1..20: mol_type = other RNA
ggacagtaaagaccgcctgg

SEQ ID NO: 614 - RNA, 20 nt, synthetic construct
  source 1..20: mol_type = other RNA
cagtaaagaccgcctggtgg

SEQ ID NO: 615 - RNA, 20 nt, synthetic construct
  source 1..20: mol_type = other RNA
agtaaagaccgcctggtggt

SEQ ID NO: 616 - RNA, 20 nt, synthetic construct
  source 1..20: mol_type = other RNA
agaccgcctggtggtgggag

SEQ ID NO: 617 - RNA, 20 nt, synthetic construct
  source 1..20: mol_type = other RNA
ttgccactcccaccaccagg

SEQ ID NO: 618 - RNA, 20 nt, synthetic construct
  source 1..20: mol_type = other RNA
gaattgccactcccaccacc

SEQ ID NO: 619 - RNA, 20 nt, synthetic construct
  source 1..20: mol_type = other RNA
caagcccagcagtagaatca

SEQ ID NO: 620 - RNA, 20 nt, synthetic construct
  source 1..20: mol_type = other RNA
agcagtagaatcatggaaag

SEQ ID NO: 621 - RNA, 20 nt, synthetic construct
  source 1..20: mol_type = other RNA
ctttccatgattctactgct

SEQ ID NO: 622 - RNA, 20 nt, synthetic construct
  source 1..20: mol_type = other RNA
actttccatgattctactgc

SEQ ID NO: 623 - RNA, 20 nt, synthetic construct
  source 1..20: mol_type = other RNA
gtggagttcgaacataatcc

SEQ ID NO: 624 - RNA, 20 nt, synthetic construct
  source 1..20: mol_type = other RNA
tggagttcgaacataatcca

SEQ ID NO: 625 - RNA, 20 nt, synthetic construct
  source 1..20: mol_type = other RNA
gcaggagtggtctatagccc

SEQ ID NO: 626 - RNA, 20 nt, synthetic construct
  source 1..20: mol_type = other RNA
atagcagtcagatgcaggag

SEQ ID NO: 627 - RNA, 20 nt, synthetic construct
  source 1..20: mol_type = other RNA
aggtaatagcagtcagatgc

SEQ ID NO: 628 - RNA, 20 nt, synthetic construct
  source 1..20: mol_type = other RNA
tattaccttgtcacaaatcc

SEQ ID NO: 629 - RNA, 20 nt, synthetic construct
  source 1..20: mol_type = other RNA
accttgtcacaaatcctggc

SEQ ID NO: 630 - RNA, 20 nt, synthetic construct
  source 1..20: mol_type = other RNA
gcctgccaggatttgtgaca

SEQ ID NO: 631 - RNA, 20 nt, synthetic construct
  source 1..20: mol_type = other RNA
gctttgtcatcttgcctgcc

SEQ ID NO: 632 - RNA, 20 nt, synthetic construct
  source 1..20: mol_type = other RNA
gatgacaaagcagttacatc

SEQ ID NO: 633 - RNA, 20 nt, synthetic construct
  source 1..20: mol_type = other RNA
agcagttacatcaggacagt

SEQ ID NO: 634 - RNA, 20 nt, synthetic construct
  source 1..20: mol_type = other RNA
tacatcaggacagttggcag

SEQ ID NO: 635 - RNA, 20 nt, synthetic construct
  source 1..20: mol_type = other RNA
tcaggacagttggcagtggc

SEQ ID NO: 636 - RNA, 20 nt, synthetic construct
  source 1..20: mol_type = other RNA
ggcagtggcaggtatgaacg

SEQ ID NO: 637 - RNA, 20 nt, synthetic construct
  source 1..20: mol_type = other RNA
aggtatgaacgtggcccctc

SEQ ID NO: 638 - RNA, 20 nt, synthetic construct
  source 1..20: mol_type = other RNA
agaggagtgacaagcctgag

SEQ ID NO: 639 - RNA, 20 nt, synthetic construct
  source 1..20: mol_type = other RNA
aagaggagtgacaagcctga

SEQ ID NO: 640 - RNA, 20 nt, synthetic construct
  source 1..20: mol_type = other RNA
aaagaggagtgacaagcctg

SEQ ID NO: 641 - RNA, 20 nt, synthetic construct
  source 1..20: mol_type = other RNA
gaactgggagtgcagtaaag

SEQ ID NO: 642 - RNA, 20 nt, synthetic construct
  source 1..20: mol_type = other RNA
gctgtctggtgtcatgaact

SEQ ID NO: 643 - RNA, 20 nt, synthetic construct
  source 1..20: mol_type = other RNA
tgctgtctggtgtcatgaac

SEQ ID NO: 644 - RNA, 20 nt, synthetic construct
  source 1..20: mol_type = other RNA
cagcaagacatgagccagat

SEQ ID NO: 645 - RNA, 20 nt, synthetic construct
  source 1..20: mol_type = other RNA
agcaagacatgagccagata

SEQ ID NO: 646 - RNA, 20 nt, synthetic construct
  source 1..20: mol_type = other RNA
gcaagacatgagccagatag

SEQ ID NO: 647 - RNA, 20 nt, synthetic construct
  source 1..20: mol_type = other RNA
catgagccagataggggcag

SEQ ID NO: 648 - RNA, 20 nt, synthetic construct
  source 1..20: mol_type = other RNA
ataggggcagtggaagctgc

SEQ ID NO: 649 - RNA, 20 nt, synthetic construct
  source 1..20: mol_type = other RNA
cagcttccactgcccctatc

SEQ ID NO: 650 - RNA, 20 nt, synthetic construct
  source 1..20: mol_type = other RNA
ggggcagtggaagctgcagg

SEQ ID NO: 651 - RNA, 20 nt, synthetic construct
  source 1..20: mol_type = other RNA
ctgcaggaggattgaagtca

SEQ ID NO: 652 - RNA, 20 nt, synthetic construct
  source 1..20: mol_type = other RNA
gtcatggagccagagatgag

SEQ ID NO: 653 - RNA, 20 nt, synthetic construct
  source 1..20: mol_type = other RNA
agccagagatgagaggaaac

SEQ ID NO: 654 - RNA, 20 nt, synthetic construct
  source 1..20: mol_type = other RNA
ggcctgtttcctctcatctc

SEQ ID NO: 655 - RNA, 20 nt, synthetic construct
  source 1..20: mol_type = other RNA
caggccaactctgtttacaa

SEQ ID NO: 656 - RNA, 20 nt, synthetic construct
  source 1..20: mol_type = other RNA
tgctcctttgtaaacagagt

SEQ ID NO: 657 - RNA, 20 nt, synthetic construct
  source 1..20: mol_type = other RNA
gtttacaaaggagcaccagc

SEQ ID NO: 658 - RNA, 20 nt, synthetic construct
  source 1..20: mol_type = other RNA
aaggagcaccagcaggagag

SEQ ID NO: 659 - RNA, 20 nt, synthetic construct
  source 1..20: mol_type = other RNA
accagcaggagagtggtgtg

SEQ ID NO: 660 - RNA, 20 nt, synthetic construct
  source 1..20: mol_type = other RNA
tcctcacaccactctcctgc

SEQ ID NO: 661 - RNA, 20 nt, synthetic construct
  source 1..20: mol_type = other RNA
tgaggattaacattccatgc

SEQ ID NO: 662 - RNA, 20 nt, synthetic construct
  source 1..20: mol_type = other RNA
gaggattaacattccatgca

SEQ ID NO: 663 - RNA, 20 nt, synthetic construct
  source 1..20: mol_type = other RNA
tgtatctgaaagaccctgca

SEQ ID NO: 664 - RNA, 20 nt, synthetic construct
  source 1..20: mol_type = other RNA
tgccagctcaactgaaaccc

SEQ ID NO: 665 - RNA, 20 nt, synthetic construct
  source 1..20: mol_type = other RNA
cagctcaactgaaacccagg

SEQ ID NO: 666 - RNA, 20 nt, synthetic construct
  source 1..20: mol_type = other RNA
ctcctgggtttcagttgagc

SEQ ID NO: 667 - RNA, 20 nt, synthetic construct
  source 1..20: mol_type = other RNA
aaacccaggaggtttcctga

SEQ ID NO: 668 - RNA, 20 nt, synthetic construct
  source 1..20: mol_type = other RNA
tcaccttcaggaaacctcct

SEQ ID NO: 669 - RNA, 20 nt, synthetic construct
  source 1..20: mol_type = other RNA
ttcaccttcaggaaacctcc

SEQ ID NO: 670 - RNA, 20 nt, synthetic construct
  source 1..20: mol_type = other RNA
agggtcttggtttcaccttc

SEQ ID NO: 671 - RNA, 20 nt, synthetic construct
  source 1..20: mol_type = other RNA
cttcagaggtagaagggtct

SEQ ID NO: 672 - RNA, 20 nt, synthetic construct
  source 1..20: mol_type = other RNA
atgcggcttcagaggtagaa

SEQ ID NO: 673 - RNA, 20 nt, synthetic construct
  source 1..20: mol_type = other RNA
aatgcggcttcagaggtaga

SEQ ID NO: 674 - RNA, 20 nt, synthetic construct
  source 1..20: mol_type = other RNA
ctgaagccgcattctgtcta

SEQ ID NO: 675 - RNA, 20 nt, synthetic construct
  source 1..20: mol_type = other RNA
tagacagaatgcggcttcag

SEQ ID NO: 676 - RNA, 20 nt, synthetic construct
  source 1..20: mol_type = other RNA
ttctgtctaaggtccgtgtt

SEQ ID NO: 677 - RNA, 20 nt, synthetic construct
  source 1..20: mol_type = other RNA
ccgtgtttggctgttttgag

SEQ ID NO: 678 - RNA, 20 nt, synthetic construct
  source 1..20: mol_type = other RNA
gtttggctgttttgagaggc

SEQ ID NO: 679 - RNA, 20 nt, synthetic construct
  source 1..20: mol_type = other RNA
tttggctgttttgagaggct

SEQ ID NO: 680 - RNA, 20 nt, synthetic construct
  source 1..20: mol_type = other RNA
gttttgagaggctgggagac

SEQ ID NO: 681 - RNA, 20 nt, synthetic construct
  source 1..20: mol_type = other RNA
caaaagagtacctgtctcac

SEQ ID NO: 682 - RNA, 20 nt, synthetic construct
  source 1..20: mol_type = other RNA
ctgtgagacaggtactcttt

SEQ ID NO: 683 - RNA, 20 nt, synthetic construct
  source 1..20: mol_type = other RNA
ctcacaggatctttcctgag

SEQ ID NO: 684 - RNA, 20 nt, synthetic construct
  source 1..20: mol_type = other RNA
aggatctttcctgagaggaa

SEQ ID NO: 685 - RNA, 20 nt, synthetic construct
  source 1..20: mol_type = other RNA
gaggaatggtctagtaagac

SEQ ID NO: 686 - RNA, 20 nt, synthetic construct
  source 1..20: mol_type = other RNA
tctagtaagactggtcatta

SEQ ID NO: 687 - RNA, 20 nt, synthetic construct
  source 1..20: mol_type = other RNA
ctagtaagactggtcattat

SEQ ID NO: 688 - RNA, 20 nt, synthetic construct
  source 1..20: mol_type = other RNA
agactggtcattatgggctt

SEQ ID NO: 689 - RNA, 20 nt, synthetic construct
  source 1..20: mol_type = other RNA
tatgggctttggagtaacac

SEQ ID NO: 690 - RNA, 20 nt, synthetic construct
  source 1..20: mol_type = other RNA
taacacaggcttaatgccac

SEQ ID NO: 691 - RNA, 20 nt, synthetic construct
  source 1..20: mol_type = other RNA
actggcgactctgccccttt

SEQ ID NO: 692 - RNA, 20 nt, synthetic construct
  source 1..20: mol_type = other RNA
aaaaggggcagagtcgccag

SEQ ID NO: 693 - RNA, 20 nt, synthetic construct
  source 1..20: mol_type = other RNA
gactctgccccttttggttg

SEQ ID NO: 694 - RNA, 20 nt, synthetic construct
  source 1..20: mol_type = other RNA
ccccttttggttgtggaaac

SEQ ID NO: 695 - RNA, 20 nt, synthetic construct
  source 1..20: mol_type = other RNA
cccttttggttgtggaaact

SEQ ID NO: 696 - RNA, 20 nt, synthetic construct
  source 1..20: mol_type = other RNA
ccagtttccacaaccaaaag

SEQ ID NO: 697 - RNA, 20 nt, synthetic construct
  source 1..20: mol_type = other RNA
cccagtttccacaaccaaaa

SEQ ID NO: 698 - RNA, 20 nt, synthetic construct
  source 1..20: mol_type = other RNA
gcccagtttccacaaccaaa

SEQ ID NO: 699 - RNA, 20 nt, synthetic construct
  source 1..20: mol_type = other RNA
tatgaaggttaagaagcttg

SEQ ID NO: 700 - RNA, 20 nt, synthetic construct
  source 1..20: mol_type = other RNA
tatatatgctttttatatga

SEQ ID NO: 701 - RNA, 20 nt, synthetic construct
  source 1..20: mol_type = other RNA
cctgtcatttctgctagccc

SEQ ID NO: 702 - RNA, 20 nt, synthetic construct
  source 1..20: mol_type = other RNA
cagggctagcagaaatgaca

SEQ ID NO: 703 - RNA, 20 nt, synthetic construct
  source 1..20: mol_type = other RNA
ccagggctagcagaaatgac

SEQ ID NO: 704 - RNA, 20 nt, synthetic construct
  source 1..20: mol_type = other RNA
gctagccctggactccagca

SEQ ID NO: 705 - RNA, 20 nt, synthetic construct
  source 1..20: mol_type = other RNA
atggaccttgctggagtcca

SEQ ID NO: 706 - RNA, 20 nt, synthetic construct
  source 1..20: mol_type = other RNA
aatggaccttgctggagtcc

SEQ ID NO: 707 - RNA, 20 nt, synthetic construct
  source 1..20: mol_type = other RNA
ccagcaaggtccatttacaa

SEQ ID NO: 708 - RNA, 20 nt, synthetic construct
  source 1..20: mol_type = other RNA
ccattgtaaatggaccttgc

SEQ ID NO: 709 - RNA, 20 nt, synthetic construct
  source 1..20: mol_type = other RNA
agtcagctatccattgtaaa

SEQ ID NO: 710 - RNA, 20 nt, synthetic construct
  source 1..20: mol_type = other RNA
tgctatcaacattcaaacaa

SEQ ID NO: 711 - RNA, 20 nt, synthetic construct
  source 1..20: mol_type = other RNA
acatttgtgaacaagaagag

SEQ ID NO: 712 - RNA, 20 nt, synthetic construct
  source 1..20: mol_type = other RNA
aagagaggacaaataacaag

SEQ ID NO: 713 - RNA, 20 nt, synthetic construct
  source 1..20: mol_type = other RNA
aggacaaataacaagaggtt

SEQ ID NO: 714 - RNA, 20 nt, synthetic construct
  source 1..20: mol_type = other RNA
aataacaagaggtttggaac

SEQ ID NO: 715 - RNA, 20 nt, synthetic construct
  source 1..20: mol_type = other RNA
ctggaagaaattccagccat

SEQ ID NO: 716 - RNA, 20 nt, synthetic construct
  source 1..20: mol_type = other RNA
gccatcggttttaaaagacg

SEQ ID NO: 717 - RNA, 20 nt, synthetic construct
  source 1..20: mol_type = other RNA
cgtcttttaaaaccgatggc

SEQ ID NO: 718 - RNA, 20 nt, synthetic construct
  source 1..20: mol_type = other RNA
tcctcgtcttttaaaaccga

SEQ ID NO: 719 - RNA, 20 nt, synthetic construct
  source 1..20: mol_type = other RNA
acgaggaccagtcttcagag

SEQ ID NO: 720 - RNA, 20 nt, synthetic construct
  source 1..20: mol_type = other RNA
ctagtggcctctctgaagac

SEQ ID NO: 721 - RNA, 20 nt, synthetic construct
  source 1..20: mol_type = other RNA
ttggagcagagtgtcactag

SEQ ID NO: 722 - RNA, 20 nt, synthetic construct
  source 1..20: mol_type = other RNA
ttttttggcaaaaagaagtt

SEQ ID NO: 723 - RNA, 20 nt, synthetic construct
  source 1..20: mol_type = other RNA
gatggagggtggcacttttt

SEQ ID NO: 724 - RNA, 20 nt, synthetic construct
  source 1..20: mol_type = other RNA
ggtgggggctggatggaggg

SEQ ID NO: 725 - RNA, 20 nt, synthetic construct
  source 1..20: mol_type = other RNA
gggggtgggggctggatgga

SEQ ID NO: 726 - RNA, 20 nt, synthetic construct
  source 1..20: mol_type = other RNA
tgggggtgggggctggatgg

SEQ ID NO: 727 - RNA, 20 nt, synthetic construct
  source 1..20: mol_type = other RNA
agatgggggtgggggctgga

SEQ ID NO: 728 - RNA, 20 nt, synthetic construct
  source 1..20: mol_type = other RNA
gcagagatgggggtgggggc

SEQ ID NO: 729 - RNA, 20 nt, synthetic construct
  source 1..20: mol_type = other RNA
acttgcagagatgggggtgg

SEQ ID NO: 730 - RNA, 20 nt, synthetic construct
  source 1..20: mol_type = other RNA
gacttgcagagatgggggtg

SEQ ID NO: 731 - RNA, 20 nt, synthetic construct
  source 1..20: mol_type = other RNA
ggacttgcagagatgggggt

SEQ ID NO: 732 - RNA, 20 nt, synthetic construct
  source 1..20: mol_type = other RNA
aggacttgcagagatggggg

SEQ ID NO: 733 - RNA, 20 nt, synthetic construct
  source 1..20: mol_type = other RNA
ccatctctgcaagtccttac

SEQ ID NO: 734 - RNA, 20 nt, synthetic construct
  source 1..20: mol_type = other RNA
gtaaggacttgcagagatgg

SEQ ID NO: 735 - RNA, 20 nt, synthetic construct
  source 1..20: mol_type = other RNA
agtaaggacttgcagagatg

SEQ ID NO: 736 - RNA, 20 nt, synthetic construct
  source 1..20: mol_type = other RNA
cagtaaggacttgcagagat

SEQ ID NO: 737 - RNA, 20 nt, synthetic construct
  source 1..20: mol_type = other RNA
ccagtaaggacttgcagaga

SEQ ID NO: 738 - RNA, 20 nt, synthetic construct
  source 1..20: mol_type = other RNA
tgcaagtccttactggcgag

SEQ ID NO: 739 - RNA, 20 nt, synthetic construct
  source 1..20: mol_type = other RNA
aagtccttactggcgagagg

SEQ ID NO: 740 - RNA, 20 nt, synthetic construct
  source 1..20: mol_type = other RNA
gtatcctcctctcgccagta

SEQ ID NO: 741 - RNA, 20 nt, synthetic construct
  source 1..20: mol_type = other RNA
aattaaaaacctgtgatata

SEQ ID NO: 742 - RNA, 20 nt, synthetic construct
  source 1..20: mol_type = other RNA
cttgtcaggccatatatcac

SEQ ID NO: 743 - RNA, 20 nt, synthetic construct
  source 1..20: mol_type = other RNA
tacatttaagaatacttgtc

SEQ ID NO: 744 - RNA, 20 nt, synthetic construct
  source 1..20: mol_type = other RNA
agtattcttaaatgtaatta

SEQ ID NO: 745 - RNA, 20 nt, synthetic construct
  source 1..20: mol_type = other RNA
gtattcttaaatgtaattaa

SEQ ID NO: 746 - RNA, 20 nt, synthetic construct
  source 1..20: mol_type = other RNA
tattcttaaatgtaattaag

SEQ ID NO: 747 - RNA, 20 nt, synthetic construct
  source 1..20: mol_type = other RNA
tagtacagaatatttccatc

SEQ ID NO: 748 - RNA, 20 nt, synthetic construct
  source 1..20: mol_type = other RNA
gatggaaatattctgtacta

SEQ ID NO: 749 - RNA, 20 nt, synthetic construct
  source 1..20: mol_type = other RNA
ttggctaaactagaaccgga

SEQ ID NO: 750 - RNA, 20 nt, synthetic construct
  source 1..20: mol_type = other RNA
tagattggctaaactagaac

SEQ ID NO: 751 - RNA, 20 nt, synthetic construct
  source 1..20: mol_type = other RNA
caatctagtaaatgatccaa

SEQ ID NO: 752 - RNA, 20 nt, synthetic construct
  source 1..20: mol_type = other RNA
aatctagtaaatgatccaaa

SEQ ID NO: 753 - RNA, 20 nt, synthetic construct
  source 1..20: mol_type = other RNA
ctttggatcatttactagat

SEQ ID NO: 754 - RNA, 20 nt, synthetic construct
  source 1..20: mol_type = other RNA
ccaaagggtcccgtgcttag

SEQ ID NO: 755 - RNA, 20 nt, synthetic construct
  source 1..20: mol_type = other RNA
caaagggtcccgtgcttaga

SEQ ID NO: 756 - RNA, 20 nt, synthetic construct
  source 1..20: mol_type = other RNA
cctctaagcacgggaccctt

SEQ ID NO: 757 - RNA, 20 nt, synthetic construct
  source 1..20: mol_type = other RNA
tcttactgccctctaagcac

SEQ ID NO: 758 - RNA, 20 nt, synthetic construct
  source 1..20: mol_type = other RNA
gtcttactgccctctaagca

SEQ ID NO: 759 - RNA, 20 nt, synthetic construct
  source 1..20: mol_type = other RNA
ctgtgcagggaggagtctta

SEQ ID NO: 760 - RNA, 20 nt, synthetic construct
  source 1..20: mol_type = other RNA
gctgtgcagggaggagtctt

SEQ ID NO: 761 - RNA, 20 nt, synthetic construct
  source 1..20: mol_type = other RNA
ggtgcaggtgctgtgcaggg

SEQ ID NO: 762 - RNA, 20 nt, synthetic construct
  source 1..20: mol_type = other RNA
gggggtgcaggtgctgtgca

SEQ ID NO: 763 - RNA, 20 nt, synthetic construct
  source 1..20: mol_type = other RNA
tgggggtgcaggtgctgtgc

SEQ ID NO: 764 - RNA, 20 nt, synthetic construct
  source 1..20: mol_type = other RNA
cacctgcacccccactgccc

SEQ ID NO: 765 - RNA, 20 nt, synthetic construct
  source 1..20: mol_type = other RNA
acctgcacccccactgccca

SEQ ID NO: 766 - RNA, 20 nt, synthetic construct
  source 1..20: mol_type = other RNA
cctgcacccccactgcccag

SEQ ID NO: 767 - RNA, 20 nt, synthetic construct
  source 1..20: mol_type = other RNA
ctgcacccccactgcccagg

SEQ ID NO: 768 - RNA, 20 nt, synthetic construct
  source 1..20: mol_type = other RNA
cccctgggcagtgggggtgc

SEQ ID NO: 769 - RNA, 20 nt, synthetic construct
  source 1..20: mol_type = other RNA
tgcagccccctgggcagtgg

SEQ ID NO: 770 - RNA, 20 nt, synthetic construct
  source 1..20: mol_type = other RNA
atgcagccccctgggcagtg

SEQ ID NO: 771 - RNA, 20 nt, synthetic construct
  source 1..20: mol_type = other RNA
gatgcagccccctgggcagt

SEQ ID NO: 772 - RNA, 20 nt, synthetic construct
  source 1..20: mol_type = other RNA
ggatgcagccccctgggcag

SEQ ID NO: 773 - RNA, 20 nt, synthetic construct
  source 1..20: mol_type = other RNA
ggagatggatgcagccccct

SEQ ID NO: 774 - RNA, 20 nt, synthetic construct
  source 1..20: mol_type = other RNA
tggagatggatgcagccccc

SEQ ID NO: 775 - RNA, 20 nt, synthetic construct
  source 1..20: mol_type = other RNA
gagggtgagtcatgtggaga

SEQ ID NO: 776 - RNA, 20 nt, synthetic construct
  source 1..20: mol_type = other RNA
cacagggagggtgagtcatg

SEQ ID NO: 777 - RNA, 20 nt, synthetic construct
  source 1..20: mol_type = other RNA
caccctccctgtgcaacgca

SEQ ID NO: 778 - RNA, 20 nt, synthetic construct
  source 1..20: mol_type = other RNA
accctccctgtgcaacgcat

SEQ ID NO: 779 - RNA, 20 nt, synthetic construct
  source 1..20: mol_type = other RNA
ccctccctgtgcaacgcatg

SEQ ID NO: 780 - RNA, 20 nt, synthetic construct
  source 1..20: mol_type = other RNA
cctccctgtgcaacgcatgg

SEQ ID NO: 781 - RNA, 20 nt, synthetic construct
  source 1..20: mol_type = other RNA
cctgtgcaacgcatgggggt

SEQ ID NO: 782 - RNA, 20 nt, synthetic construct
  source 1..20: mol_type = other RNA
ctgtgcaacgcatgggggta

SEQ ID NO: 783 - RNA, 20 nt, synthetic construct
  source 1..20: mol_type = other RNA
tgcaacgcatgggggtaggg

SEQ ID NO: 784 - RNA, 20 nt, synthetic construct
  source 1..20: mol_type = other RNA
gcaacgcatgggggtaggga

SEQ ID NO: 785 - RNA, 20 nt, synthetic construct
  source 1..20: mol_type = other RNA
attatcagccatcagcaccc

SEQ ID NO: 786 - RNA, 20 nt, synthetic construct
  source 1..20: mol_type = other RNA
ttatcagccatcagcaccct

SEQ ID NO: 787 - RNA, 20 nt, synthetic construct
  source 1..20: mol_type = other RNA
tatcagccatcagcaccctg

SEQ ID NO: 788 - RNA, 20 nt, synthetic construct
  source 1..20: mol_type = other RNA
agttcaccccagggtgctga

SEQ ID NO: 789 - RNA, 20 nt, synthetic construct
  source 1..20: mol_type = other RNA
cctggggtgaactgattatc

SEQ ID NO: 790 - RNA, 20 nt, synthetic construct
  source 1..20: mol_type = other RNA
ctgataatcagttcacccca

SEQ ID NO: 791 - RNA, 20 nt, synthetic construct
  source 1..20: mol_type = other RNA
cctgataatcagttcacccc

SEQ ID NO: 792 - RNA, 20 nt, synthetic construct
  source 1..20: mol_type = other RNA
aaacacacctaataaagcct

SEQ ID NO: 793 - RNA, 20 nt, synthetic construct
  source 1..20: mol_type = other RNA
aataaagccttggagacaca

SEQ ID NO: 794 - RNA, 20 nt, synthetic construct
  source 1..20: mol_type = other RNA
tgtgtctccaaggctttatt

SEQ ID NO: 795 - RNA, 20 nt, synthetic construct
  source 1..20: mol_type = other RNA
gtgcttgccatgtgtctcca

SEQ ID NO: 796 - RNA, 20 nt, synthetic construct
  source 1..20: mol_type = other RNA
acacatggcaagcaccgtga

SEQ ID NO: 797 - RNA, 20 nt, synthetic construct
  source 1..20: mol_type = other RNA
aaatcgcttctagtccatca

SEQ ID NO: 798 - RNA, 20 nt, synthetic construct
  source 1..20: mol_type = other RNA
gctttgaatgcaatgtcagc

SEQ ID NO: 799 - RNA, 20 nt, synthetic construct
  source 1..20: mol_type = other RNA
tgcaatgtcagctggatgct

SEQ ID NO: 800 - RNA, 20 nt, synthetic construct
  source 1..20: mol_type = other RNA
ttggtgagcagaaatagaca

SEQ ID NO: 801 - RNA, 20 nt, synthetic construct
  source 1..20: mol_type = other RNA
tggtgagcagaaatagacaa

SEQ ID NO: 802 - RNA, 20 nt, synthetic construct
  source 1..20: mol_type = other RNA
ggtgagcagaaatagacaag

SEQ ID NO: 803 - RNA, 20 nt, synthetic construct
  source 1..20: mol_type = other RNA
cagaaatagacaaggggaaa

SEQ ID NO: 804 - RNA, 20 nt, synthetic construct
  source 1..20: mol_type = other RNA
aaggggaaatggagcaagcg

SEQ ID NO: 805 - RNA, 20 nt, synthetic construct
  source 1..20: mol_type = other RNA
aaatggagcaagcgcggcat

SEQ ID NO: 806 - RNA, 20 nt, synthetic construct
  source 1..20: mol_type = other RNA
aatggagcaagcgcggcata

SEQ ID NO: 807 - RNA, 20 nt, synthetic construct
  source 1..20: mol_type = other RNA
atggagcaagcgcggcatag

SEQ ID NO: 808 - RNA, 20 nt, synthetic construct
  source 1..20: mol_type = other RNA
ttcctaagtttacctaagac

SEQ ID NO: 809 - RNA, 20 nt, synthetic construct
  source 1..20: mol_type = other RNA
tcctaagtttacctaagact

SEQ ID NO: 810 - RNA, 20 nt, synthetic construct
  source 1..20: mol_type = other RNA
cctaagtttacctaagactg

SEQ ID NO: 811 - RNA, 20 nt, synthetic construct
  source 1..20: mol_type = other RNA
ccccagtcttaggtaaactt

SEQ ID NO: 812 - RNA, 20 nt, synthetic construct
  source 1..20: mol_type = other RNA
tttacctaagactggggcca

SEQ ID NO: 813 - RNA, 20 nt, synthetic construct
  source 1..20: mol_type = other RNA
ttacctaagactggggccac

SEQ ID NO: 814 - RNA, 20 nt, synthetic construct
  source 1..20: mol_type = other RNA
tacctaagactggggccacg

SEQ ID NO: 815 - RNA, 20 nt, synthetic construct
  source 1..20: mol_type = other RNA
taagactggggccacggggt

SEQ ID NO: 816 - RNA, 20 nt, synthetic construct
  source 1..20: mol_type = other RNA
aagactggggccacggggtc

SEQ ID NO: 817 - RNA, 20 nt, synthetic construct
  source 1..20: mol_type = other RNA
gaccccgtggccccagtctt

SEQ ID NO: 818 - RNA, 20 nt, synthetic construct
  source 1..20: mol_type = other RNA
ccacggggtcgggtgtcccc

SEQ ID NO: 819 - RNA, 20 nt, synthetic construct
  source 1..20: mol_type = other RNA
cacggggtcgggtgtcccct

SEQ ID NO: 820 - RNA, 20 nt, synthetic construct
  source 1..20: mol_type = other RNA
ccaggggacacccgaccccg

SEQ ID NO: 821 - RNA, 20 nt, synthetic construct
  source 1..20: mol_type = other RNA
gcatgagacgtaggtcccag

SEQ ID NO: 822 - RNA, 20 nt, synthetic construct
  source 1..20: mol_type = other RNA
tgcatgagacgtaggtccca

SEQ ID NO: 823 - RNA, 20 nt, synthetic construct
  source 1..20: mol_type = other RNA
gacctacgtctcatgcagcc

SEQ ID NO: 824 - RNA, 20 nt, synthetic construct
  source 1..20: mol_type = other RNA
acctacgtctcatgcagcct

SEQ ID NO: 825 - RNA, 20 nt, synthetic construct
  source 1..20: mol_type = other RNA
cctacgtctcatgcagcctg

SEQ ID NO: 826 - RNA, 20 nt, synthetic construct
  source 1..20: mol_type = other RNA
ccccaggctgcatgagacgt

SEQ ID NO: 827 - RNA, 20 nt, synthetic construct
  source 1..20: mol_type = other RNA
tgcagcctggggtccagagc

SEQ ID NO: 828 - RNA, 20 nt, synthetic construct
  source 1..20: mol_type = other RNA
gcctggggtccagagctggc

SEQ ID NO: 829 - RNA, 20 nt, synthetic construct
  source 1..20: mol_type = other RNA
tcctgccagctctggacccc

SEQ ID NO: 830 - RNA, 20 nt, synthetic construct
  source 1..20: mol_type = other RNA
tccagagctggcaggaacaa

SEQ ID NO: 831 - RNA, 20 nt, synthetic construct
  source 1..20: mol_type = other RNA
gctggcaggaacaatggaga

SEQ ID NO: 832 - RNA, 20 nt, synthetic construct
  source 1..20: mol_type = other RNA
ctggcaggaacaatggagat

SEQ ID NO: 833 - RNA, 20 nt, synthetic construct
  source 1..20: mol_type = other RNA
tggcaggaacaatggagatg

SEQ ID NO: 834 - RNA, 20 nt, synthetic construct
  source 1..20: mol_type = other RNA
acaatggagatggggaccaa

SEQ ID NO: 835 - RNA, 20 nt, synthetic construct
  source 1..20: mol_type = other RNA
aaagcagcggtgacagcctt

SEQ ID NO: 836 - RNA, 20 nt, synthetic construct
  source 1..20: mol_type = other RNA
ggcatttcgagaaaaagcag

SEQ ID NO: 837 - RNA, 20 nt, synthetic construct
  source 1..20: mol_type = other RNA
tttttctcgaaatgcccgcc

SEQ ID NO: 838 - RNA, 20 nt, synthetic construct
  source 1..20: mol_type = other RNA
ttttctcgaaatgcccgccc

SEQ ID NO: 839 - RNA, 20 nt, synthetic construct
  source 1..20: mol_type = other RNA
atgcccgcccgggtcctgtc

SEQ ID NO: 840 - RNA, 20 nt, synthetic construct
  source 1..20: mol_type = other RNA
tgcccgcccgggtcctgtct

SEQ ID NO: 841 - RNA, 20 nt, synthetic construct
  source 1..20: mol_type = other RNA
gcccgcccgggtcctgtctg

SEQ ID NO: 842 - RNA, 20 nt, synthetic construct
  source 1..20: mol_type = other RNA
gccccagacaggacccgggc

SEQ ID NO: 843 - RNA, 20 nt, synthetic construct
  source 1..20: mol_type = other RNA
agccccagacaggacccggg

SEQ ID NO: 844 - RNA, 20 nt, synthetic construct
  source 1..20: mol_type = other RNA
gggagccccagacaggaccc

SEQ ID NO: 845 - RNA, 20 nt, synthetic construct
  source 1..20: mol_type = other RNA
cgggagccccagacaggacc

SEQ ID NO: 846 - RNA, 20 nt, synthetic construct
  source 1..20: mol_type = other RNA
cgtaggcgggagccccagac

SEQ ID NO: 847 - RNA, 20 nt, synthetic construct
  source 1..20: mol_type = other RNA
cacgtgatgagcgcgtaggc

SEQ ID NO: 848 - RNA, 20 nt, synthetic construct
  source 1..20: mol_type = other RNA
gcacgtgatgagcgcgtagg

SEQ ID NO: 849 - RNA, 20 nt, synthetic construct
  source 1..20: mol_type = other RNA
tgtgcacgtgatgagcgcgt

SEQ ID NO: 850 - RNA, 20 nt, synthetic construct
  source 1..20: mol_type = other RNA
cagcccaaacttttcagagc

SEQ ID NO: 851 - RNA, 20 nt, synthetic construct
  source 1..20: mol_type = other RNA
aacttttcagagccggcccg

SEQ ID NO: 852 - RNA, 20 nt, synthetic construct
  source 1..20: mol_type = other RNA
gggccggctctgaaaagttt

SEQ ID NO: 853 - RNA, 20 nt, synthetic construct
  source 1..20: mol_type = other RNA
cgggccggctctgaaaagtt

SEQ ID NO: 854 - RNA, 20 nt, synthetic construct
  source 1..20: mol_type = other RNA
cagagccggcccgaggcctg

SEQ ID NO: 855 - RNA, 20 nt, synthetic construct
  source 1..20: mol_type = other RNA
agagccggcccgaggcctgc

SEQ ID NO: 856 - RNA, 20 nt, synthetic construct
  source 1..20: mol_type = other RNA
cggcccgaggcctgcgggcc

SEQ ID NO: 857 - RNA, 20 nt, synthetic construct
  source 1..20: mol_type = other RNA
ggcccgaggcctgcgggccc

SEQ ID NO: 858 - RNA, 20 nt, synthetic construct
  source 1..20: mol_type = other RNA
cgggcccgcaggcctcgggc

SEQ ID NO: 859 - RNA, 20 nt, synthetic construct
  source 1..20: mol_type = other RNA
ggcctgcgggcccgggcgcc

SEQ ID NO: 860 - RNA, 20 nt, synthetic construct
  source 1..20: mol_type = other RNA
gcctgcgggcccgggcgcca

SEQ ID NO: 861 - RNA, 20 nt, synthetic construct
  source 1..20: mol_type = other RNA
tgcgggcccgggcgccaggg

SEQ ID NO: 862 - RNA, 20 nt, synthetic construct
  source 1..20: mol_type = other RNA
accctggcgcccgggcccgc

SEQ ID NO: 863 - RNA, 20 nt, synthetic construct
  source 1..20: mol_type = other RNA
cgggcgccagggtggttttt

SEQ ID NO: 864 - RNA, 20 nt, synthetic construct
  source 1..20: mol_type = other RNA
gggcgccagggtggttttta

SEQ ID NO: 865 - RNA, 20 nt, synthetic construct
  source 1..20: mol_type = other RNA
taaaaaccaccctggcgccc

SEQ ID NO: 866 - RNA, 20 nt, synthetic construct
  source 1..20: mol_type = other RNA
ctaaaaaccaccctggcgcc

SEQ ID NO: 867 - RNA, 20 nt, synthetic construct
  source 1..20: mol_type = other RNA
gaaaaccctaaaaaccaccc

SEQ ID NO: 868 - RNA, 20 nt, synthetic construct
  source 1..20: mol_type = other RNA
tcaactgtggagaagaagaa

SEQ ID NO: 869 - RNA, 20 nt, synthetic construct
  source 1..20: mol_type = other RNA
atcaactgtggagaagaaga

SEQ ID NO: 870 - RNA, 20 nt, synthetic construct
  source 1..20: mol_type = other RNA
ctgcagaaaatcatcaactg

SEQ ID NO: 871 - RNA, 20 nt, synthetic construct
  source 1..20: mol_type = other RNA
atgggaactggaaatgaaat

SEQ ID NO: 872 - RNA, 20 nt, synthetic construct
  source 1..20: mol_type = other RNA
gaaatcgcggtgatgggaac

SEQ ID NO: 873 - RNA, 20 nt, synthetic construct
  source 1..20: mol_type = other RNA
ccatcaccgcgatttccaca

SEQ ID NO: 874 - RNA, 20 nt, synthetic construct
  source 1..20: mol_type = other RNA
catgtggaaatcgcggtgat

SEQ ID NO: 875 - RNA, 20 nt, synthetic construct
  source 1..20: mol_type = other RNA
ccatgtggaaatcgcggtga

SEQ ID NO: 876 - RNA, 20 nt, synthetic construct
  source 1..20: mol_type = other RNA
tcacatccatgtggaaatcg

SEQ ID NO: 877 - RNA, 20 nt, synthetic construct
  source 1..20: mol_type = other RNA
ggggtcacgtcacatccatg

SEQ ID NO: 878 - RNA, 20 nt, synthetic construct
  source 1..20: mol_type = other RNA
ccccagcttccgaaatgccc

SEQ ID NO: 879 - RNA, 20 nt, synthetic construct
  source 1..20: mol_type = other RNA
cctgggcatttcggaagctg

SEQ ID NO: 880 - RNA, 20 nt, synthetic construct
  source 1..20: mol_type = other RNA
acctgggcatttcggaagct

SEQ ID NO: 881 - RNA, 20 nt, synthetic construct
  source 1..20: mol_type = other RNA
cacctgggcatttcggaagc

SEQ ID NO: 882 - RNA, 20 nt, synthetic construct
  source 1..20: mol_type = other RNA
aaatgcccaggtgactcacg

SEQ ID NO: 883 - RNA, 20 nt, synthetic construct
  source 1..20: mol_type = other RNA
aatgcccaggtgactcacgc

SEQ ID NO: 884 - RNA, 20 nt, synthetic construct
  source 1..20: mol_type = other RNA
atgcccaggtgactcacgcg

SEQ ID NO: 885 - RNA, 20 nt, synthetic construct
  source 1..20: mol_type = other RNA
tgtccccgcgtgagtcacct

SEQ ID NO: 886 - RNA, 20 nt, synthetic construct
  source 1..20: mol_type = other RNA
tgactcacgcggggacaccc

SEQ ID NO: 887 - RNA, 20 nt, synthetic construct
  source 1..20: mol_type = other RNA
gactcacgcggggacacccc

SEQ ID NO: 888 - RNA, 20 nt, synthetic construct
  source 1..20: mol_type = other RNA
actcacgcggggacaccccg

SEQ ID NO: 889 - RNA, 20 nt, synthetic construct
  source 1..20: mol_type = other RNA
tgcgcagtctgcagtcttcg

SEQ ID NO: 890 - RNA, 20 nt, synthetic construct
  source 1..20: mol_type = other RNA
gcagtctgcagtcttcgtgg

SEQ ID NO: 891 - RNA, 20 nt, synthetic construct
  source 1..20: mol_type = other RNA
cagtctgcagtcttcgtggc

SEQ ID NO: 892 - RNA, 20 nt, synthetic construct
  source 1..20: mol_type = other RNA
cgtggcgggccaagcgagct

SEQ ID NO: 893 - RNA, 20 nt, synthetic construct
  source 1..20: mol_type = other RNA
ccaagcgagcttggagcccg

SEQ ID NO: 894 - RNA, 20 nt, synthetic construct
  source 1..20: mol_type = other RNA
caagcgagcttggagcccgc

SEQ ID NO: 895 - RNA, 20 nt, synthetic construct
  source 1..20: mol_type = other RNA
aagcgagcttggagcccgcg

SEQ ID NO: 896 - RNA, 20 nt, synthetic construct
  source 1..20: mol_type = other RNA
agcgagcttggagcccgcgg

SEQ ID NO: 897 - RNA, 20 nt, synthetic construct
  source 1..20: mol_type = other RNA
ccgcgggctccaagctcgct

SEQ ID NO: 898 - RNA, 20 nt, synthetic construct
  source 1..20: mol_type = other RNA
gagcttggagcccgcggggg

SEQ ID NO: 899 - RNA, 20 nt, synthetic construct
  source 1..20: mol_type = other RNA
tggagcccgcgggggcggag

SEQ ID NO: 900 - RNA, 20 nt, synthetic construct
  source 1..20: mol_type = other RNA
cgggggcggagcggtgagag

SEQ ID NO: 901 - RNA, 20 nt, synthetic construct
  source 1..20: mol_type = other RNA
tctcaccgctccgcccccgc

SEQ ID NO: 902 - RNA, 20 nt, synthetic construct
  source 1..20: mol_type = other RNA
ctctcaccgctccgcccccg

SEQ ID NO: 903 - RNA, 20 nt, synthetic construct
  source 1..20: mol_type = other RNA
gggggtgtgatctctcttgg

SEQ ID NO: 904 - RNA, 20 nt, synthetic construct
  source 1..20: mol_type = other RNA
gctgggggtgtgatctctct

SEQ ID NO: 905 - RNA, 20 nt, synthetic construct
  source 1..20: mol_type = other RNA
tcgctggcagggtcggctgg

SEQ ID NO: 906 - RNA, 20 nt, synthetic construct
  source 1..20: mol_type = other RNA
ctcgctggcagggtcggctg

SEQ ID NO: 907 - RNA, 20 nt, synthetic construct
  source 1..20: mol_type = other RNA
gctcgctggcagggtcggct

SEQ ID NO: 908 - RNA, 20 nt, synthetic construct
  source 1..20: mol_type = other RNA
cgctcgctggcagggtcggc

SEQ ID NO: 909 - RNA, 20 nt, synthetic construct
  source 1..20: mol_type = other RNA
ggctcgctcgctggcagggt

SEQ ID NO: 910 - RNA, 20 nt, synthetic construct
  source 1..20: mol_type = other RNA
gtcgggctcgctcgctggca

SEQ ID NO: 911 - RNA, 20 nt, synthetic construct
  source 1..20: mol_type = other RNA
cagcgagcgagcccgacccc

SEQ ID NO: 912 - RNA, 20 nt, synthetic construct
  source 1..20: mol_type = other RNA
ctggggtcgggctcgctcgc

SEQ ID NO: 913 - RNA, 20 nt, synthetic construct
  source 1..20: mol_type = other RNA
agcccgaccccaggcgtcca

SEQ ID NO: 914 - RNA, 20 nt, synthetic construct
  source 1..20: mol_type = other RNA
ctccatggacgcctggggtc

SEQ ID NO: 915 - RNA, 20 nt, synthetic construct
  source 1..20: mol_type = other RNA
gctccatggacgcctggggt

SEQ ID NO: 916 - RNA, 20 nt, synthetic construct
  source 1..20: mol_type = other RNA
cgacgctccatggacgcctg

SEQ ID NO: 917 - RNA, 20 nt, synthetic construct
  source 1..20: mol_type = other RNA
gcgacgctccatggacgcct

SEQ ID NO: 918 - RNA, 20 nt, synthetic construct
  source 1..20: mol_type = other RNA
ggcgacgctccatggacgcc

SEQ ID NO: 919 - RNA, 20 nt, synthetic construct
  source 1..20: mol_type = other RNA
catggagcgtcgcctccgcc

SEQ ID NO: 920 - RNA, 20 nt, synthetic construct
  source 1..20: mol_type = other RNA
cgggcggaggcgacgctcca

SEQ ID NO: 921 - RNA, 20 nt, synthetic construct
  source 1..20: mol_type = other RNA
tcggggcagggaccgggcgg

SEQ ID NO: 922 - RNA, 20 nt, synthetic construct
  source 1..20: mol_type = other RNA
gggtcggggcagggaccggg

SEQ ID NO: 923 - RNA, 20 nt, synthetic construct
  source 1..20: mol_type = other RNA
cgggggtcggggcagggacc

SEQ ID NO: 924 - RNA, 20 nt, synthetic construct
  source 1..20: mol_type = other RNA
gcgggggtcggggcagggac

SEQ ID NO: 925 - RNA, 20 nt, synthetic construct
  source 1..20: mol_type = other RNA
cctgccccgacccccgcctg

SEQ ID NO: 926 - RNA, 20 nt, synthetic construct
  source 1..20: mol_type = other RNA
cgcaggcgggggtcggggca

SEQ ID NO: 927 - RNA, 20 nt, synthetic construct
  source 1..20: mol_type = other RNA
ccgcaggcgggggtcggggc

SEQ ID NO: 928 - RNA, 20 nt, synthetic construct
  source 1..20: mol_type = other RNA
cgcgccgcaggcgggggtcg

SEQ ID NO: 929 - RNA, 20 nt, synthetic construct
  source 1..20: mol_type = other RNA
gcgcgccgcaggcgggggtc

SEQ ID NO: 930 - RNA, 20 nt, synthetic construct
  source 1..20: mol_type = other RNA
agcgcgccgcaggcgggggt

SEQ ID NO: 931 - RNA, 20 nt, synthetic construct
  source 1..20: mol_type = other RNA
caggagcgcgccgcaggcgg

SEQ ID NO: 932 - RNA, 20 nt, synthetic construct
  source 1..20: mol_type = other RNA
gcaggagcgcgccgcaggcg

SEQ ID NO: 933 - RNA, 20 nt, synthetic construct
  source 1..20: mol_type = other RNA
ggcaggagcgcgccgcaggc

SEQ ID NO: 934 - RNA, 20 nt, synthetic construct
  source 1..20: mol_type = other RNA
aggcaggagcgcgccgcagg

SEQ ID NO: 935 - RNA, 20 nt, synthetic construct
  source 1..20: mol_type = other RNA
ggcgcgctcctgccttgacc

SEQ ID NO: 936 - RNA, 20 nt, synthetic construct
  source 1..20: mol_type = other RNA
ctcctgccttgaccaggact

SEQ ID NO: 937 - RNA, 20 nt, synthetic construct
  source 1..20: mol_type = other RNA
tcctgccttgaccaggactt

SEQ ID NO: 938 - RNA, 20 nt, synthetic construct
  source 1..20: mol_type = other RNA
tcccaagtcctggtcaaggc

SEQ ID NO: 939 - RNA, 20 nt, synthetic construct
  source 1..20: mol_type = other RNA
aaagtcccaagtcctggtca

SEQ ID NO: 940 - RNA, 20 nt, synthetic construct
  source 1..20: mol_type = other RNA
aggacttgggactttgcgaa

SEQ ID NO: 941 - RNA, 20 nt, synthetic construct
  source 1..20: mol_type = other RNA
tttcgcaaagtcccaagtcc

SEQ ID NO: 942 - RNA, 20 nt, synthetic construct
  source 1..20: mol_type = other RNA
gggactttgcgaaaggatcg

SEQ ID NO: 943 - RNA, 20 nt, synthetic construct
  source 1..20: mol_type = other RNA
ggactttgcgaaaggatcgc

SEQ ID NO: 944 - RNA, 20 nt, synthetic construct
  source 1..20: mol_type = other RNA
gactttgcgaaaggatcgcg

SEQ ID NO: 945 - RNA, 20 nt, synthetic construct
  source 1..20: mol_type = other RNA
tgcgaaaggatcgcggggcc

SEQ ID NO: 946 - RNA, 20 nt, synthetic construct
  source 1..20: mol_type = other RNA
aaggatcgcggggcccggag

SEQ ID NO: 947 - RNA, 20 nt, synthetic construct
  source 1..20: mol_type = other RNA
ggcgcggcggttacctctcc

SEQ ID NO: 948 - RNA, 20 nt, synthetic construct
  source 1..20: mol_type = other RNA
gaggtaaccgccgcgcctcc

SEQ ID NO: 949 - RNA, 20 nt, synthetic construct
  source 1..20: mol_type = other RNA
aaccgccgcgcctcccggag

SEQ ID NO: 950 - RNA, 20 nt, synthetic construct
  source 1..20: mol_type = other RNA
tacctctccgggaggcgcgg

SEQ ID NO: 951 - RNA, 20 nt, synthetic construct
  source 1..20: mol_type = other RNA
ggttacctctccgggaggcg

SEQ ID NO: 952 - RNA, 20 nt, synthetic construct
  source 1..20: mol_type = other RNA
gcggcggttacctctccggg

SEQ ID NO: 953 - RNA, 20 nt, synthetic construct
  source 1..20: mol_type = other RNA
ggcgcggcggttacctctcc

SEQ ID NO: 954 - RNA, 20 nt, synthetic construct
  source 1..20: mol_type = other RNA
gaggtaaccgccgcgcctcc

SEQ ID NO: 955 - RNA, 20 nt, synthetic construct
  source 1..20: mol_type = other RNA
aaccgccgcgcctcccggag

SEQ ID NO: 956 - RNA, 20 nt, synthetic construct
  source 1..20: mol_type = other RNA
tacctctccgggaggcgcgg

SEQ ID NO: 957 - RNA, 20 nt, synthetic construct
  source 1..20: mol_type = other RNA
ggttacctctccgggaggcg

SEQ ID NO: 958 - RNA, 20 nt, synthetic construct
  source 1..20: mol_type = other RNA
gcggcggttacctctccggg

SEQ ID NO: 959 - RNA, 20 nt, synthetic construct
  source 1..20: mol_type = other RNA
ggcgcggcggttacctctcc

SEQ ID NO: 960 - RNA, 20 nt, synthetic construct
  source 1..20: mol_type = other RNA
aggcgcggcggttacctctc

SEQ ID NO: 961 - RNA, 20 nt, synthetic construct
  source 1..20: mol_type = other RNA
gacggcacggggaggcgcgg

SEQ ID NO: 962 - RNA, 20 nt, synthetic construct
  source 1..20: mol_type = other RNA
cctccccgtgccgtctgcct

SEQ ID NO: 963 - RNA, 20 nt, synthetic construct
  source 1..20: mol_type = other RNA
ctccccgtgccgtctgcctc

SEQ ID NO: 964 - RNA, 20 nt, synthetic construct
  source 1..20: mol_type = other RNA
ccgaggcagacggcacgggg

SEQ ID NO: 965 - RNA, 20 nt, synthetic construct
  source 1..20: mol_type = other RNA
agcccgaggcagacggcacg

SEQ ID NO: 966 - RNA, 20 nt, synthetic construct
  source 1..20: mol_type = other RNA
gagcccgaggcagacggcac

SEQ ID NO: 967 - RNA, 20 nt, synthetic construct
  source 1..20: mol_type = other RNA
tgagcccgaggcagacggca

SEQ ID NO: 968 - RNA, 20 nt, synthetic construct
  source 1..20: mol_type = other RNA
tgcggtgagcccgaggcaga

SEQ ID NO: 969 - RNA, 20 nt, synthetic construct
  source 1..20: mol_type = other RNA
cctcgggctcaccgcagtca

SEQ ID NO: 970 - RNA, 20 nt, synthetic construct
  source 1..20: mol_type = other RNA
ctcgggctcaccgcagtcaa

SEQ ID NO: 971 - RNA, 20 nt, synthetic construct
  source 1..20: mol_type = other RNA
ccttgactgcggtgagcccg

SEQ ID NO: 972 - RNA, 20 nt, synthetic construct
  source 1..20: mol_type = other RNA
ctcaccgcagtcaagggctg

SEQ ID NO: 973 - RNA, 20 nt, synthetic construct
  source 1..20: mol_type = other RNA
tcaccgcagtcaagggctgc

SEQ ID NO: 974 - RNA, 20 nt, synthetic construct
  source 1..20: mol_type = other RNA
gcacccgcagcccttgactg

SEQ ID NO: 975 - RNA, 20 nt, synthetic construct
  source 1..20: mol_type = other RNA
caagggctgcgggtgcatgt

SEQ ID NO: 976 - RNA, 20 nt, synthetic construct
  source 1..20: mol_type = other RNA
aagggctgcgggtgcatgtt

SEQ ID NO: 977 - RNA, 20 nt, synthetic construct
  source 1..20: mol_type = other RNA
gcatgttgggcagcgacccc

SEQ ID NO: 978 - RNA, 20 nt, synthetic construct
  source 1..20: mol_type = other RNA
catgttgggcagcgaccccc

SEQ ID NO: 979 - RNA, 20 nt, synthetic construct
  source 1..20: mol_type = other RNA
ttgggcagcgacccccgggc

SEQ ID NO: 980 - RNA, 20 nt, synthetic construct
  source 1..20: mol_type = other RNA
ccgggctggcaccgtctacc

SEQ ID NO: 981 - RNA, 20 nt, synthetic construct
  source 1..20: mol_type = other RNA
ggtagacggtgccagcccgg

SEQ ID NO: 982 - RNA, 20 nt, synthetic construct
  source 1..20: mol_type = other RNA
aggtagacggtgccagcccg

SEQ ID NO: 983 - RNA, 20 nt, synthetic construct
  source 1..20: mol_type = other RNA
caggtagacggtgccagccc

SEQ ID NO: 984 - RNA, 20 nt, synthetic construct
  source 1..20: mol_type = other RNA
ccaggtagacggtgccagcc

SEQ ID NO: 985 - RNA, 20 nt, synthetic construct
  source 1..20: mol_type = other RNA
tggcaccgtctacctggcgt

SEQ ID NO: 986 - RNA, 20 nt, synthetic construct
  source 1..20: mol_type = other RNA
caaaaccaacgccaggtaga

SEQ ID NO: 987 - RNA, 20 nt, synthetic construct
  source 1..20: mol_type = other RNA
cgttggttttgcagcgctcc

SEQ ID NO: 988 - RNA, 20 nt, synthetic construct
  source 1..20: mol_type = other RNA
gttttgcagcgctcctggac

SEQ ID NO: 989 - RNA, 20 nt, synthetic construct
  source 1..20: mol_type = other RNA
ttttgcagcgctcctggact

SEQ ID NO: 990 - RNA, 20 nt, synthetic construct
  source 1..20: mol_type = other RNA
ctcctggactgggagtttgt

SEQ ID NO: 991 - RNA, 20 nt, synthetic construct
  source 1..20: mol_type = other RNA
gtccaacaaactcccagtcc

SEQ ID NO: 992 - RNA, 20 nt, synthetic construct
  source 1..20: mol_type = other RNA
gtttgttggacgtttctgtc

SEQ ID NO: 993 - RNA, 20 nt, synthetic construct
  source 1..20: mol_type = other RNA
tttgttggacgtttctgtct

SEQ ID NO: 994 - RNA, 20 nt, synthetic construct
  source 1..20: mol_type = other RNA
ctgtctgggttttgaagtgc

SEQ ID NO: 995 - RNA, 20 nt, synthetic construct
  source 1..20: mol_type = other RNA
tgtctgggttttgaagtgct

SEQ ID NO: 996 - RNA, 20 nt, synthetic construct
  source 1..20: mol_type = other RNA
ttttgaagtgctgggagttg

SEQ ID NO: 997 - RNA, 20 nt, synthetic construct
  source 1..20: mol_type = other RNA
agttgaggtcactgctgcag

SEQ ID NO: 998 - RNA, 20 nt, synthetic construct
  source 1..20: mol_type = other RNA
gaggtcactgctgcagaggt

SEQ ID NO: 999 - RNA, 20 nt, synthetic construct
  source 1..20: mol_type = other RNA
agaggttggagtgacagccc

SEQ ID NO: 1000 - RNA, 20 nt, synthetic construct
  source 1..20: mol_type = other RNA
cagctggctggaggtatcca

SEQ ID NO: 1001 - RNA, 20 nt, synthetic construct
  source 1..20: mol_type = other RNA
acagctggctggaggtatcc

SEQ ID NO: 1002 - RNA, 20 nt, synthetic construct
  source 1..20: mol_type = other RNA
tgaaaggaacagctggctgg

SEQ ID NO: 1003 - RNA, 20 nt, synthetic construct
  source 1..20: mol_type = other RNA
atctgaaaggaacagctggc

SEQ ID NO: 1004 - RNA, 20 nt, synthetic construct
  source 1..20: mol_type = other RNA
tgttcctttcagataatgca

SEQ ID NO: 1005 - RNA, 20 nt, synthetic construct
  source 1..20: mol_type = other RNA
agttccgtgcattatctgaa

SEQ ID NO: 1006 - RNA, 20 nt, synthetic construct
  source 1..20: mol_type = other RNA
gaacttaagctgcagctgac

SEQ ID NO: 1007 - RNA, 20 nt, synthetic construct
  source 1..20: mol_type = other RNA
gctgcagctgactggtgaag

SEQ ID NO: 1008 - RNA, 20 nt, synthetic construct
  source 1..20: mol_type = other RNA
actggtgaagaggcgcccct

SEQ ID NO: 1009 - RNA, 20 nt, synthetic construct
  source 1..20: mol_type = other RNA
ctggtgaagaggcgcccctc

SEQ ID NO: 1010 - RNA, 20 nt, synthetic construct
  source 1..20: mol_type = other RNA
cgcccctcgggccctccgat

SEQ ID NO: 1011 - RNA, 20 nt, synthetic construct
  source 1..20: mol_type = other RNA
gcccctcgggccctccgatc

SEQ ID NO: 1012 - RNA, 20 nt, synthetic construct
  source 1..20: mol_type = other RNA
cctcgggccctccgatcggg

SEQ ID NO: 1013 - RNA, 20 nt, synthetic construct
  source 1..20: mol_type = other RNA
acccgatcggagggcccgag

SEQ ID NO: 1014 - RNA, 20 nt, synthetic construct
  source 1..20: mol_type = other RNA
cacccgatcggagggcccga

SEQ ID NO: 1015 - RNA, 20 nt, synthetic construct
  source 1..20: mol_type = other RNA
ccacccgatcggagggcccg

SEQ ID NO: 1016 - RNA, 20 nt, synthetic construct
  source 1..20: mol_type = other RNA
ccctccgatcgggtggtcgt

SEQ ID NO: 1017 - RNA, 20 nt, synthetic construct
  source 1..20: mol_type = other RNA
ccaacgaccacccgatcgga

SEQ ID NO: 1018 - RNA, 20 nt, synthetic construct
  source 1..20: mol_type = other RNA
gccaacgaccacccgatcgg

SEQ ID NO: 1019 - RNA, 20 nt, synthetic construct
  source 1..20: mol_type = other RNA
agcgccaacgaccacccgat

SEQ ID NO: 1020 - RNA, 20 nt, synthetic construct
  source 1..20: mol_type = other RNA
tgctcctttcgtgtcttttt

SEQ ID NO: 1021 - RNA, 20 nt, synthetic construct
  source 1..20: mol_type = other RNA
ggctccaaaaaagacacgaa

SEQ ID NO: 1022 - RNA, 20 nt, synthetic construct
  source 1..20: mol_type = other RNA
agccaagcgttgcatgctca

SEQ ID NO: 1023 - RNA, 20 nt, synthetic construct
  source 1..20: mol_type = other RNA
ggccatgagcatgcaacgct

SEQ ID NO: 1024 - RNA, 20 nt, synthetic construct
  source 1..20: mol_type = other RNA
tagaccttgcagaagcgctg

SEQ ID NO: 1025 - RNA, 20 nt, synthetic construct
  source 1..20: mol_type = other RNA
aaagccgcagcgcttctgca

SEQ ID NO: 1026 - RNA, 20 nt, synthetic construct
  source 1..20: mol_type = other RNA
ggctttttcccaaattgtgc

SEQ ID NO: 1027 - RNA, 20 nt, synthetic construct
  source 1..20: mol_type = other RNA
attgtgcaggaccagcccga

SEQ ID NO: 1028 - RNA, 20 nt, synthetic construct
  source 1..20: mol_type = other RNA
ttgtgcaggaccagcccgac

SEQ ID NO: 1029 - RNA, 20 nt, synthetic construct
  source 1..20: mol_type = other RNA
tgtgcaggaccagcccgacg

SEQ ID NO: 1030 - RNA, 20 nt, synthetic construct
  source 1..20: mol_type = other RNA
ggaccagcccgacggggcgt

SEQ ID NO: 1031 - RNA, 20 nt, synthetic construct
  source 1..20: mol_type = other RNA
gaccagcccgacggggcgta

SEQ ID NO: 1032 - RNA, 20 nt, synthetic construct
  source 1..20: mol_type = other RNA
taccctacgccccgtcgggc

SEQ ID NO: 1033 - RNA, 20 nt, synthetic construct
  source 1..20: mol_type = other RNA
cggggcgtagggtaccgcag

SEQ ID NO: 1034 - RNA, 20 nt, synthetic construct
  source 1..20: mol_type = other RNA
tgcggtaccctacgccccgt

SEQ ID NO: 1035 - RNA, 20 nt, synthetic construct
  source 1..20: mol_type = other RNA
taccgcagtggccgccagcc

SEQ ID NO: 1036 - RNA, 20 nt, synthetic construct
  source 1..20: mol_type = other RNA
cgcagtggccgccagcccgg

SEQ ID NO: 1037 - RNA, 20 nt, synthetic construct
  source 1..20: mol_type = other RNA
agtggccgccagcccggcgg

SEQ ID NO: 1038 - RNA, 20 nt, synthetic construct
  source 1..20: mol_type = other RNA
cgccgggctggcggccactg

SEQ ID NO: 1039 - RNA, 20 nt, synthetic construct
  source 1..20: mol_type = other RNA
ggccgccagcccggcggagg

SEQ ID NO: 1040 - RNA, 20 nt, synthetic construct
  source 1..20: mol_type = other RNA
gccgccagcccggcggaggt

SEQ ID NO: 1041 - RNA, 20 nt, synthetic construct
  source 1..20: mol_type = other RNA
ccgccagcccggcggaggtg

SEQ ID NO: 1042 - RNA, 20 nt, synthetic construct
  source 1..20: mol_type = other RNA
cgccagcccggcggaggtgg

SEQ ID NO: 1043 - RNA, 20 nt, synthetic construct
  source 1..20: mol_type = other RNA
gccagcccggcggaggtggg

SEQ ID NO: 1044 - RNA, 20 nt, synthetic construct
  source 1..20: mol_type = other RNA
ccccacctccgccgggctgg

SEQ ID NO: 1045 - RNA, 20 nt, synthetic construct
  source 1..20: mol_type = other RNA
gccccccacctccgccgggc

SEQ ID NO: 1046 - RNA, 20 nt, synthetic construct
  source 1..20: mol_type = other RNA
tgaagccccccacctccgcc

SEQ ID NO: 1047 - RNA, 20 nt, synthetic construct
  source 1..20: mol_type = other RNA
ctgaagccccccacctccgc

SEQ ID NO: 1048 - RNA, 20 nt, synthetic construct
  source 1..20: mol_type = other RNA
gcgtctgggaagctgtctct

SEQ ID NO: 1049 - RNA, 20 nt, synthetic construct
  source 1..20: mol_type = other RNA
gacagcttcccagacgctca

SEQ ID NO: 1050 - RNA, 20 nt, synthetic construct
  source 1..20: mol_type = other RNA
acagcttcccagacgctcac

SEQ ID NO: 1051 - RNA, 20 nt, synthetic construct
  source 1..20: mol_type = other RNA
agacgctcacgggtccttgc

SEQ ID NO: 1052 - RNA, 20 nt, synthetic construct
  source 1..20: mol_type = other RNA
gacgctcacgggtccttgca

SEQ ID NO: 1053 - RNA, 20 nt, synthetic construct
  source 1..20: mol_type = other RNA
acgctcacgggtccttgcag

SEQ ID NO: 1054 - RNA, 20 nt, synthetic construct
  source 1..20: mol_type = other RNA
cgctcacgggtccttgcagg

SEQ ID NO: 1055 - RNA, 20 nt, synthetic construct
  source 1..20: mol_type = other RNA
cacgggtccttgcagggggc

SEQ ID NO: 1056 - RNA, 20 nt, synthetic construct
  source 1..20: mol_type = other RNA
acgggtccttgcagggggct

SEQ ID NO: 1057 - RNA, 20 nt, synthetic construct
  source 1..20: mol_type = other RNA
cgggtccttgcagggggctg

SEQ ID NO: 1058 - RNA, 20 nt, synthetic construct
  source 1..20: mol_type = other RNA
cttgcagggggctggggtcc

SEQ ID NO: 1059 - RNA, 20 nt, synthetic construct
  source 1..20: mol_type = other RNA
caggaccccagccccctgca

SEQ ID NO: 1060 - RNA, 20 nt, synthetic construct
  source 1..20: mol_type = other RNA
agggggctggggtcctggcg

SEQ ID NO: 1061 - RNA, 20 nt, synthetic construct
  source 1..20: mol_type = other RNA
gggggctggggtcctggcgc

SEQ ID NO: 1062 - RNA, 20 nt, synthetic construct
  source 1..20: mol_type = other RNA
ggggctggggtcctggcgcg

SEQ ID NO: 1063 - RNA, 20 nt, synthetic construct
  source 1..20: mol_type = other RNA
gaaaagctgaaccccgcgcc

SEQ ID NO: 1064 - RNA, 20 nt, synthetic construct
  source 1..20: mol_type = other RNA
ttctcttacactgctgctac

SEQ ID NO: 1065 - RNA, 20 nt, synthetic construct
  source 1..20: mol_type = other RNA
gagaagtatgcatgtagacg

SEQ ID NO: 1066 - RNA, 20 nt, synthetic construct
  source 1..20: mol_type = other RNA
agaagtatgcatgtagacgt

SEQ ID NO: 1067 - RNA, 20 nt, synthetic construct
  source 1..20: mol_type = other RNA
tgcatgtagacgtgggtcgc

SEQ ID NO: 1068 - RNA, 20 nt, synthetic construct
  source 1..20: mol_type = other RNA
ctgctccagcccctacccca

SEQ ID NO: 1069 - RNA, 20 nt, synthetic construct
  source 1..20: mol_type = other RNA
tggggtaggggctggagcag

SEQ ID NO: 1070 - RNA, 20 nt, synthetic construct
  source 1..20: mol_type = other RNA
gtggggtaggggctggagca

SEQ ID NO: 1071 - RNA, 20 nt, synthetic construct
  source 1..20: mol_type = other RNA
cgtggggtaggggctggagc

SEQ ID NO: 1072 - RNA, 20 nt, synthetic construct
  source 1..20: mol_type = other RNA
tctaaccgtggggtaggggc

SEQ ID NO: 1073 - RNA, 20 nt, synthetic construct
  source 1..20: mol_type = other RNA
acagtctaaccgtggggtag

SEQ ID NO: 1074 - RNA, 20 nt, synthetic construct
  source 1..20: mol_type = other RNA
gacagtctaaccgtggggta

SEQ ID NO: 1075 - RNA, 20 nt, synthetic construct
  source 1..20: mol_type = other RNA
agacagtctaaccgtggggt

SEQ ID NO: 1076 - RNA, 20 nt, synthetic construct
  source 1..20: mol_type = other RNA
acaaagacagtctaaccgtg

SEQ ID NO: 1077 - RNA, 20 nt, synthetic construct
  source 1..20: mol_type = other RNA
gacaaagacagtctaaccgt

SEQ ID NO: 1078 - RNA, 20 nt, synthetic construct
  source 1..20: mol_type = other RNA
gttagactgtctttgtcagc

SEQ ID NO: 1079 - RNA, 20 nt, synthetic construct
  source 1..20: mol_type = other RNA
tcgtcccacatcctgccacc

SEQ ID NO: 1080 - RNA, 20 nt, synthetic construct
  source 1..20: mol_type = other RNA
gaggccaggtggcaggatgt

SEQ ID NO: 1081 - RNA, 20 nt, synthetic construct
  source 1..20: mol_type = other RNA
agaggccaggtggcaggatg

SEQ ID NO: 1082 - RNA, 20 nt, synthetic construct
  source 1..20: mol_type = other RNA
tttctgagaggccaggtggc

SEQ ID NO: 1083 - RNA, 20 nt, synthetic construct
  source 1..20: mol_type = other RNA
ctggcctctcagaaaagcag

SEQ ID NO: 1084 - RNA, 20 nt, synthetic construct
  source 1..20: mol_type = other RNA
tgcttttctgagaggccagg

SEQ ID NO: 1085 - RNA, 20 nt, synthetic construct
  source 1..20: mol_type = other RNA
cactgcttttctgagaggcc

SEQ ID NO: 1086 - RNA, 20 nt, synthetic construct
  source 1..20: mol_type = other RNA
aatgccactgcttttctgag

SEQ ID NO: 1087 - RNA, 20 nt, synthetic construct
  source 1..20: mol_type = other RNA
aaaagcagtggcattaagta

SEQ ID NO: 1088 - RNA, 20 nt, synthetic construct
  source 1..20: mol_type = other RNA
gcagtggcattaagtaagga

SEQ ID NO: 1089 - RNA, 20 nt, synthetic construct
  source 1..20: mol_type = other RNA
gcactggatttggggagtac

SEQ ID NO: 1090 - RNA, 20 nt, synthetic construct
  source 1..20: mol_type = other RNA
ccccaaatccagtgctgttc

SEQ ID NO: 1091 - RNA, 20 nt, synthetic construct
  source 1..20: mol_type = other RNA
cccaaatccagtgctgttca

SEQ ID NO: 1092 - RNA, 20 nt, synthetic construct
  source 1..20: mol_type = other RNA
aaatccagtgctgttcaggg

SEQ ID NO: 1093 - RNA, 20 nt, synthetic construct
  source 1..20: mol_type = other RNA
cctgaacagcactggatttg

SEQ ID NO: 1094 - RNA, 20 nt, synthetic construct
  source 1..20: mol_type = other RNA
ccctgaacagcactggattt

SEQ ID NO: 1095 - RNA, 20 nt, synthetic construct
  source 1..20: mol_type = other RNA
accctgaacagcactggatt

SEQ ID NO: 1096 - RNA, 20 nt, synthetic construct
  source 1..20: mol_type = other RNA
gaggccaccctgaacagcac

SEQ ID NO: 1097 - RNA, 20 nt, synthetic construct
  source 1..20: mol_type = other RNA
agggtggcctcagaatgaaa

SEQ ID NO: 1098 - RNA, 20 nt, synthetic construct
  source 1..20: mol_type = other RNA
gggtggcctcagaatgaaac

SEQ ID NO: 1099 - RNA, 20 nt, synthetic construct
  source 1..20: mol_type = other RNA
taagctcccgtttcattctg

SEQ ID NO: 1100 - RNA, 20 nt, synthetic construct
  source 1..20: mol_type = other RNA
aatgaaacgggagcttaagt

SEQ ID NO: 1101 - RNA, 20 nt, synthetic construct
  source 1..20: mol_type = other RNA
gggagcttaagttggttttg

SEQ ID NO: 1102 - RNA, 20 nt, synthetic construct
  source 1..20: mol_type = other RNA
agtacctgttgctgacagac

SEQ ID NO: 1103 - RNA, 20 nt, synthetic construct
  source 1..20: mol_type = other RNA
gtacctgttgctgacagaca

SEQ ID NO: 1104 - RNA, 20 nt, synthetic construct
  source 1..20: mol_type = other RNA
ctgttgctgacagacagggt

SEQ ID NO: 1105 - RNA, 20 nt, synthetic construct
  source 1..20: mol_type = other RNA
caaccctgtctgtcagcaac

SEQ ID NO: 1106 - RNA, 20 nt, synthetic construct
  source 1..20: mol_type = other RNA
gtccagtgtgagttaatctc

SEQ ID NO: 1107 - RNA, 20 nt, synthetic construct
  source 1..20: mol_type = other RNA
tccagtgtgagttaatctct

SEQ ID NO: 1108 - RNA, 20 nt, synthetic construct
  source 1..20: mol_type = other RNA
ccagtgtgagttaatctctg

SEQ ID NO: 1109 - RNA, 20 nt, synthetic construct
  source 1..20: mol_type = other RNA
ccccagagattaactcacac

SEQ ID NO: 1110 - RNA, 20 nt, synthetic construct
  source 1..20: mol_type = other RNA
tctggggccagctagtatcc

SEQ ID NO: 1111 - RNA, 20 nt, synthetic construct
  source 1..20: mol_type = other RNA
ctggggccagctagtatccc

SEQ ID NO: 1112 - RNA, 20 nt, synthetic construct
  source 1..20: mol_type = other RNA
agctagtatcccgggagtag

SEQ ID NO: 1113 - RNA, 20 nt, synthetic construct
  source 1..20: mol_type = other RNA
tctactcccgggatactagc

SEQ ID NO: 1114 - RNA, 20 nt, synthetic construct
  source 1..20: mol_type = other RNA
atcttagcacctctactccc

SEQ ID NO: 1115 - RNA, 20 nt, synthetic construct
  source 1..20: mol_type = other RNA
gatcttagcacctctactcc

SEQ ID NO: 1116 - RNA, 20 nt, synthetic construct
  source 1..20: mol_type = other RNA
agatcttttgcctacagatc

SEQ ID NO: 1117 - RNA, 20 nt, synthetic construct
  source 1..20: mol_type = other RNA
gatcttttgcctacagatca

SEQ ID NO: 1118 - RNA, 20 nt, synthetic construct
  source 1..20: mol_type = other RNA
ttgtcattaccctgatctgt

SEQ ID NO: 1119 - RNA, 20 nt, synthetic construct
  source 1..20: mol_type = other RNA
gtaatgacaagatcaaacac

SEQ ID NO: 1120 - RNA, 20 nt, synthetic construct
  source 1..20: mol_type = other RNA
taatgacaagatcaaacact

SEQ ID NO: 1121 - RNA, 20 nt, synthetic construct
  source 1..20: mol_type = other RNA
aatgacaagatcaaacactg

SEQ ID NO: 1122 - RNA, 20 nt, synthetic construct
  source 1..20: mol_type = other RNA
caaacactggggtttcctgc

SEQ ID NO: 1123 - RNA, 20 nt, synthetic construct
  source 1..20: mol_type = other RNA
tttcctgcaggcagctatag

SEQ ID NO: 1124 - RNA, 20 nt, synthetic construct
  source 1..20: mol_type = other RNA
actcctctatagctgcctgc

SEQ ID NO: 1125 - RNA, 20 nt, synthetic construct
  source 1..20: mol_type = other RNA
agaggagtcgtattaaagtc

SEQ ID NO: 1126 - RNA, 20 nt, synthetic construct
  source 1..20: mol_type = other RNA
ttaaagtcaggctaatagaa

SEQ ID NO: 1127 - RNA, 20 nt, synthetic construct
  source 1..20: mol_type = other RNA
ttttttttcctttccttttc

SEQ ID NO: 1128 - RNA, 20 nt, synthetic construct
  source 1..20: mol_type = other RNA
ttcctttccttttcaggtgt

SEQ ID NO: 1129 - RNA, 20 nt, synthetic construct
  source 1..20: mol_type = other RNA
ctccaacacctgaaaaggaa

SEQ ID NO: 1130 - RNA, 20 nt, synthetic construct
  source 1..20: mol_type = other RNA
tcaggtgttggagagcacaa

SEQ ID NO: 1131 - RNA, 20 nt, synthetic construct
  source 1..20: mol_type = other RNA
tgcggaaagctgtgaagata

SEQ ID NO: 1132 - RNA, 20 nt, synthetic construct
  source 1..20: mol_type = other RNA
gcggaaagctgtgaagatac

SEQ ID NO: 1133 - RNA, 20 nt, synthetic construct
  source 1..20: mol_type = other RNA
gtaggtttaaaaatgtcttc

SEQ ID NO: 1134 - RNA, 20 nt, synthetic construct
  source 1..20: mol_type = other RNA
gacatttttaaacctactaa

SEQ ID NO: 1135 - RNA, 20 nt, synthetic construct
  source 1..20: mol_type = other RNA
acatttttaaacctactaat

SEQ ID NO: 1136 - RNA, 20 nt, synthetic construct
  source 1..20: mol_type = other RNA
tgatgaatgatcccattagt

SEQ ID NO: 1137 - RNA, 20 nt, synthetic construct
  source 1..20: mol_type = other RNA
tcaactggtgtcgagaagtc

SEQ ID NO: 1138 - RNA, 20 nt, synthetic construct
  source 1..20: mol_type = other RNA
gggcgttcaggacacagact

SEQ ID NO: 1139 - RNA, 20 nt, synthetic construct
  source 1..20: mol_type = other RNA
aggacacagacttggtactg

SEQ ID NO: 1140 - RNA, 20 nt, synthetic construct
  source 1..20: mol_type = other RNA
cacagacttggtactgagga

SEQ ID NO: 1141 - RNA, 20 nt, synthetic construct
  source 1..20: mol_type = other RNA
ggcgctgttcagcacgctca

SEQ ID NO: 1142 - RNA, 20 nt, synthetic construct
  source 1..20: mol_type = other RNA
actggagtctctcaaatctc

SEQ ID NO: 1143 - RNA, 20 nt, synthetic construct
  source 1..20: mol_type = other RNA
atctcaggaatttgttgaaa

SEQ ID NO: 1144 - RNA, 20 nt, synthetic construct
  source 1..20: mol_type = other RNA
tctcaggaatttgttgaaac

SEQ ID NO: 1145 - RNA, 20 nt, synthetic construct
  source 1..20: mol_type = other RNA
ctcaggaatttgttgaaacg

SEQ ID NO: 1146 - RNA, 20 nt, synthetic construct
  source 1..20: mol_type = other RNA
cggggctttgctatgatact

SEQ ID NO: 1147 - RNA, 20 nt, synthetic construct
  source 1..20: mol_type = other RNA
ggggctttgctatgatactc

SEQ ID NO: 1148 - RNA, 20 nt, synthetic construct
  source 1..20: mol_type = other RNA
ctttgctatgatactcgggt

SEQ ID NO: 1149 - RNA, 20 nt, synthetic construct
  source 1..20: mol_type = other RNA
caccccgctccccttagaac

SEQ ID NO: 1150 - RNA, 20 nt, synthetic construct
  source 1..20: mol_type = other RNA
ttccagttctaaggggagcg

SEQ ID NO: 1151 - RNA, 20 nt, synthetic construct
  source 1..20: mol_type = other RNA
attccagttctaaggggagc

SEQ ID NO: 1152 - RNA, 20 nt, synthetic construct
  source 1..20: mol_type = other RNA
cattccagttctaaggggag

SEQ ID NO: 1153 - RNA, 20 nt, synthetic construct
  source 1..20: mol_type = other RNA
cttagaactggaatgatgaa

SEQ ID NO: 1154 - RNA, 20 nt, synthetic construct
  source 1..20: mol_type = other RNA
ttagaactggaatgatgaat

SEQ ID NO: 1155 - RNA, 20 nt, synthetic construct
  source 1..20: mol_type = other RNA
ttcatcattccagttctaag

SEQ ID NO: 1156 - RNA, 20 nt, synthetic construct
  source 1..20: mol_type = other RNA
attcatcattccagttctaa

SEQ ID NO: 1157 - RNA, 20 nt, synthetic construct
  source 1..20: mol_type = other RNA
cattcatcattccagttcta

SEQ ID NO: 1158 - RNA, 20 nt, synthetic construct
  source 1..20: mol_type = other RNA
atgggacaatcttatcaaaa

SEQ ID NO: 1159 - RNA, 20 nt, synthetic construct
  source 1..20: mol_type = other RNA
tcctttgcaacatcctcaga

SEQ ID NO: 1160 - RNA, 20 nt, synthetic construct
  source 1..20: mol_type = other RNA
ggtgagatgcctgcagatca

SEQ ID NO: 1161 - RNA, 20 nt, synthetic construct
  source 1..20: mol_type = other RNA
gtctgttcaaagaaagagaa

SEQ ID NO: 1162 - RNA, 20 nt, synthetic construct
  source 1..20: mol_type = other RNA
agacaaaatgctaagaagtt

SEQ ID NO: 1163 - RNA, 20 nt, synthetic construct
  source 1..20: mol_type = other RNA
atgctaagaagtttggaatc

SEQ ID NO: 1164 - RNA, 20 nt, synthetic construct
  source 1..20: mol_type = other RNA
caatttcgcccctttgaaag

SEQ ID NO: 1165 - RNA, 20 nt, synthetic construct
  source 1..20: mol_type = other RNA
aatttcgcccctttgaaagt

SEQ ID NO: 1166 - RNA, 20 nt, synthetic construct
  source 1..20: mol_type = other RNA
ttcgcccctttgaaagtggg

SEQ ID NO: 1167 - RNA, 20 nt, synthetic construct
  source 1..20: mol_type = other RNA
aattccacccactttcaaag

SEQ ID NO: 1168 - RNA, 20 nt, synthetic construct
  source 1..20: mol_type = other RNA
aaattccacccactttcaaa

SEQ ID NO: 1169 - RNA, 20 nt, synthetic construct
  source 1..20: mol_type = other RNA
taaattccacccactttcaa

SEQ ID NO: 1170 - RNA, 20 nt, synthetic construct
  source 1..20: mol_type = other RNA
gaatttacttgcctctccac

SEQ ID NO: 1171 - RNA, 20 nt, synthetic construct
  source 1..20: mol_type = other RNA
accaggcccactgtccttca

SEQ ID NO: 1172 - RNA, 20 nt, synthetic construct
  source 1..20: mol_type = other RNA
caccaggcccactgtccttc

SEQ ID NO: 1173 - RNA, 20 nt, synthetic construct
  source 1..20: mol_type = other RNA
attaatgcagttttctcacc

SEQ ID NO: 1174 - RNA, 20 nt, synthetic construct
  source 1..20: mol_type = other RNA
tggaacagctcggatttcta

SEQ ID NO: 1175 - RNA, 20 nt, synthetic construct
  source 1..20: mol_type = other RNA
tgttaacaagtggaacagct

SEQ ID NO: 1176 - RNA, 20 nt, synthetic construct
  source 1..20: mol_type = other RNA
ttccacttgttaacagagac

SEQ ID NO: 1177 - RNA, 20 nt, synthetic construct
  source 1..20: mol_type = other RNA
tccacttgttaacagagacc

SEQ ID NO: 1178 - RNA, 20 nt, synthetic construct
  source 1..20: mol_type = other RNA
ccacttgttaacagagaccg

SEQ ID NO: 1179 - RNA, 20 nt, synthetic construct
  source 1..20: mol_type = other RNA
ccccggtctctgttaacaag

SEQ ID NO: 1180 - RNA, 20 nt, synthetic construct
  source 1..20: mol_type = other RNA
ttaagtcttcaaatcttccc

SEQ ID NO: 1181 - RNA, 20 nt, synthetic construct
  source 1..20: mol_type = other RNA
agatcctgaaaatgagatga

SEQ ID NO: 1182 - RNA, 20 nt, synthetic construct
  source 1..20: mol_type = other RNA
cccgtccaaggctgggacca

SEQ ID NO: 1183 - RNA, 20 nt, synthetic construct
  source 1..20: mol_type = other RNA
catggtcccagccttggacg

SEQ ID NO: 1184 - RNA, 20 nt, synthetic construct
  source 1..20: mol_type = other RNA
ccatggtcccagccttggac

SEQ ID NO: 1185 - RNA, 20 nt, synthetic construct
  source 1..20: mol_type = other RNA
gccatggtcccagccttgga

SEQ ID NO: 1186 - RNA, 20 nt, synthetic construct
  source 1..20: mol_type = other RNA
ttgtgccatggtcccagcct

SEQ ID NO: 1187 - RNA, 20 nt, synthetic construct
  source 1..20: mol_type = other RNA
tgatgagatgagttgtgcca

SEQ ID NO: 1188 - RNA, 20 nt, synthetic construct
  source 1..20: mol_type = other RNA
aacataaactgcttactttg

SEQ ID NO: 1189 - RNA, 20 nt, synthetic construct
  source 1..20: mol_type = other RNA
attttttccttttggtcttc

SEQ ID NO: 1190 - RNA, 20 nt, synthetic construct
  source 1..20: mol_type = other RNA
tttccttttggtcttcaggt

SEQ ID NO: 1191 - RNA, 20 nt, synthetic construct
  source 1..20: mol_type = other RNA
catccaacctgaagaccaaa

SEQ ID NO: 1192 - RNA, 20 nt, synthetic construct
  source 1..20: mol_type = other RNA
tctaccagattgatttcttt

SEQ ID NO: 1193 - RNA, 20 nt, synthetic construct
  source 1..20: mol_type = other RNA
cagcgagcaggggaggagag

SEQ ID NO: 1194 - RNA, 20 nt, synthetic construct
  source 1..20: mol_type = other RNA
agcgagcaggggaggagaga

SEQ ID NO: 1195 - RNA, 20 nt, synthetic construct
  source 1..20: mol_type = other RNA
gcgagcaggggaggagagag

SEQ ID NO: 1196 - RNA, 20 nt, synthetic construct
  source 1..20: mol_type = other RNA
ggggcacgcccagaatccca

SEQ ID NO: 1197 - RNA, 20 nt, synthetic construct
  source 1..20: mol_type = other RNA
acatccatgagagaaagctg

SEQ ID NO: 1198 - RNA, 20 nt, synthetic construct
  source 1..20: mol_type = other RNA
tacatccatgagagaaagct

SEQ ID NO: 1199 - RNA, 20 nt, synthetic construct
  source 1..20: mol_type = other RNA
ttacatccatgagagaaagc

SEQ ID NO: 1200 - RNA, 20 nt, synthetic construct
  source 1..20: mol_type = other RNA
gacatgaagaaggggcagtt

SEQ ID NO: 1201 - RNA, 20 nt, synthetic construct
  source 1..20: mol_type = other RNA
agacatgaagaaggggcagt

SEQ ID NO: 1202 - RNA, 20 nt, synthetic construct
  source 1..20: mol_type = other RNA
tgttcacagacatgaagaag

SEQ ID NO: 1203 - RNA, 20 nt, synthetic construct
  source 1..20: mol_type = other RNA
gtgttcacagacatgaagaa

SEQ ID NO: 1204 - RNA, 20 nt, synthetic construct
  source 1..20: mol_type = other RNA
ggtgttcacagacatgaaga

SEQ ID NO: 1205 - RNA, 20 nt, synthetic construct
  source 1..20: mol_type = other RNA
gccgcctctctgagcactca

SEQ ID NO: 1206 - RNA, 20 nt, synthetic construct
  source 1..20: mol_type = other RNA
agaccactgccatgaagtgc

SEQ ID NO: 1207 - RNA, 20 nt, synthetic construct
  source 1..20: mol_type = other RNA
gccatgaagtgcaggagccc

SEQ ID NO: 1208 - RNA, 20 nt, synthetic construct
  source 1..20: mol_type = other RNA
gccggggctcctgcacttca

SEQ ID NO: 1209 - RNA, 20 nt, synthetic construct
  source 1..20: mol_type = other RNA
gtgaacgttgccacaacgcc

SEQ ID NO: 1210 - RNA, 20 nt, synthetic construct
  source 1..20: mol_type = other RNA
cgtgaagttgccgggcgttg

SEQ ID NO: 1211 - RNA, 20 nt, synthetic construct
  source 1..20: mol_type = other RNA
cctgcctccaggatgttacc

SEQ ID NO: 1212 - RNA, 20 nt, synthetic construct
  source 1..20: mol_type = other RNA
cctggtaacatcctggaggc

SEQ ID NO: 1213 - RNA, 20 nt, synthetic construct
  source 1..20: mol_type = other RNA
atgtcctggtaacatcctgg

SEQ ID NO: 1214 - RNA, 20 nt, synthetic construct
  source 1..20: mol_type = other RNA
gatgttaccaggacatttaa

SEQ ID NO: 1215 - RNA, 20 nt, synthetic construct
  source 1..20: mol_type = other RNA
atgttaccaggacatttaat

SEQ ID NO: 1216 - RNA, 20 nt, synthetic construct
  source 1..20: mol_type = other RNA
gcagatcccattaaatgtcc

SEQ ID NO: 1217 - RNA, 20 nt, synthetic construct
  source 1..20: mol_type = other RNA
tctgcagtacttgcttcaaa

SEQ ID NO: 1218 - RNA, 20 nt, synthetic construct
  source 1..20: mol_type = other RNA
cttcaaaaggactacagcag

SEQ ID NO: 1219 - RNA, 20 nt, synthetic construct
  source 1..20: mol_type = other RNA
gctggtgctgaggctggagg

SEQ ID NO: 1220 - RNA, 20 nt, synthetic construct
  source 1..20: mol_type = other RNA
gaggctggtgctgaggctgg

SEQ ID NO: 1221 - RNA, 20 nt, synthetic construct
  source 1..20: mol_type = other RNA
agggaggctggtgctgaggc

SEQ ID NO: 1222 - RNA, 20 nt, synthetic construct
  source 1..20: mol_type = other RNA
aaggagggaggctggtgctg

SEQ ID NO: 1223 - RNA, 20 nt, synthetic construct
  source 1..20: mol_type = other RNA
gtgacaggaaggagggaggc

SEQ ID NO: 1224 - RNA, 20 nt, synthetic construct
  source 1..20: mol_type = other RNA
gctggtgacaggaaggaggg

SEQ ID NO: 1225 - RNA, 20 nt, synthetic construct
  source 1..20: mol_type = other RNA
aacgctggtgacaggaagga

SEQ ID NO: 1226 - RNA, 20 nt, synthetic construct
  source 1..20: mol_type = other RNA
gaacgctggtgacaggaagg

SEQ ID NO: 1227 - RNA, 20 nt, synthetic construct
  source 1..20: mol_type = other RNA
ttggaacgctggtgacagga

SEQ ID NO: 1228 - RNA, 20 nt, synthetic construct
  source 1..20: mol_type = other RNA
tgacttggaacgctggtgac

SEQ ID NO: 1229 - RNA, 20 nt, synthetic construct
  source 1..20: mol_type = other RNA
gttccaagtcagatccctcg

SEQ ID NO: 1230 - RNA, 20 nt, synthetic construct
  source 1..20: mol_type = other RNA
gagccgcgagggatctgact

SEQ ID NO: 1231 - RNA, 20 nt, synthetic construct
  source 1..20: mol_type = other RNA
cagatccctcgcggctcgtc

SEQ ID NO: 1232 - RNA, 20 nt, synthetic construct
  source 1..20: mol_type = other RNA
gggctccggacgagccgcga

SEQ ID NO: 1233 - RNA, 20 nt, synthetic construct
  source 1..20: mol_type = other RNA
ggggctccggacgagccgcg

SEQ ID NO: 1234 - RNA, 20 nt, synthetic construct
  source 1..20: mol_type = other RNA
aagaatgcggggaggggctc

SEQ ID NO: 1235 - RNA, 20 nt, synthetic construct
  source 1..20: mol_type = other RNA
tgtggcaagaatgcggggag

SEQ ID NO: 1236 - RNA, 20 nt, synthetic construct
  source 1..20: mol_type = other RNA
ctgtggcaagaatgcgggga

SEQ ID NO: 1237 - RNA, 20 nt, synthetic construct
  source 1..20: mol_type = other RNA
ccgcattcttgccacagagc

SEQ ID NO: 1238 - RNA, 20 nt, synthetic construct
  source 1..20: mol_type = other RNA
agctctgtggcaagaatgcg

SEQ ID NO: 1239 - RNA, 20 nt, synthetic construct
  source 1..20: mol_type = other RNA
cagctctgtggcaagaatgc

SEQ ID NO: 1240 - RNA, 20 nt, synthetic construct
  source 1..20: mol_type = other RNA
ccagctctgtggcaagaatg

SEQ ID NO: 1241 - RNA, 20 nt, synthetic construct
  source 1..20: mol_type = other RNA
gggcgtcgtttccagctctg

SEQ ID NO: 1242 - RNA, 20 nt, synthetic construct
  source 1..20: mol_type = other RNA
gctggaaacgacgcccctgc

SEQ ID NO: 1243 - RNA, 20 nt, synthetic construct
  source 1..20: mol_type = other RNA
ttgagacaggcagccagcag

SEQ ID NO: 1244 - RNA, 20 nt, synthetic construct
  source 1..20: mol_type = other RNA
cttgagacaggcagccagca

SEQ ID NO: 1245 - RNA, 20 nt, synthetic construct
  source 1..20: mol_type = other RNA
gcttgagacaggcagccagc

SEQ ID NO: 1246 - RNA, 20 nt, synthetic construct
  source 1..20: mol_type = other RNA
gctgcctgtctcaagctgca

SEQ ID NO: 1247 - RNA, 20 nt, synthetic construct
  source 1..20: mol_type = other RNA
tctcaagctgcacggactcc

SEQ ID NO: 1248 - RNA, 20 nt, synthetic construct
  source 1..20: mol_type = other RNA
ctcaagctgcacggactcct

SEQ ID NO: 1249 - RNA, 20 nt, synthetic construct
  source 1..20: mol_type = other RNA
tcaagctgcacggactcctg

SEQ ID NO: 1250 - RNA, 20 nt, synthetic construct
  source 1..20: mol_type = other RNA
ctgcacggactcctggggac

SEQ ID NO: 1251 - RNA, 20 nt, synthetic construct
  source 1..20: mol_type = other RNA
acggactcctggggacagga

SEQ ID NO: 1252 - RNA, 20 nt, synthetic construct
  source 1..20: mol_type = other RNA
cggactcctggggacaggac

SEQ ID NO: 1253 - RNA, 20 nt, synthetic construct
  source 1..20: mol_type = other RNA
ggactcctggggacaggacg

SEQ ID NO: 1254 - RNA, 20 nt, synthetic construct
  source 1..20: mol_type = other RNA
ctcgtccccgtcctgtcccc

SEQ ID NO: 1255 - RNA, 20 nt, synthetic construct
  source 1..20: mol_type = other RNA
agtcccaaaatacacgcagc

SEQ ID NO: 1256 - RNA, 20 nt, synthetic construct
  source 1..20: mol_type = other RNA
ttttgggactccagaaaaca

SEQ ID NO: 1257 - RNA, 20 nt, synthetic construct
  source 1..20: mol_type = other RNA
tttgggactccagaaaacaa

SEQ ID NO: 1258 - RNA, 20 nt, synthetic construct
  source 1..20: mol_type = other RNA
gtgcaaaagcccttgttttc

SEQ ID NO: 1259 - RNA, 20 nt, synthetic construct
  source 1..20: mol_type = other RNA
gaaaacaaacgtgagtgaag

SEQ ID NO: 1260 - RNA, 20 nt, synthetic construct
  source 1..20: mol_type = other RNA
cagcaaaatctacatgagaa

SEQ ID NO: 1261 - RNA, 20 nt, synthetic construct
  source 1..20: mol_type = other RNA
gtagattttgctgctgcctc

SEQ ID NO: 1262 - RNA, 20 nt, synthetic construct
  source 1..20: mol_type = other RNA
tagattttgctgctgcctca

SEQ ID NO: 1263 - RNA, 20 nt, synthetic construct
  source 1..20: mol_type = other RNA
gggagggaatgcggcaccct

SEQ ID NO: 1264 - RNA, 20 nt, synthetic construct
  source 1..20: mol_type = other RNA
gggtgccgcattccctcccc

SEQ ID NO: 1265 - RNA, 20 nt, synthetic construct
  source 1..20: mol_type = other RNA
cttggaagcaccatgtttga

SEQ ID NO: 1266 - RNA, 20 nt, synthetic construct
  source 1..20: mol_type = other RNA
ttcaaacatggtgcttccaa

SEQ ID NO: 1267 - RNA, 20 nt, synthetic construct
  source 1..20: mol_type = other RNA
cttcaaacatggtgcttcca

SEQ ID NO: 1268 - RNA, 20 nt, synthetic construct
  source 1..20: mol_type = other RNA
ctggcagtatccttcaaaca

SEQ ID NO: 1269 - RNA, 20 nt, synthetic construct
  source 1..20: mol_type = other RNA
gagcttcaatgaaacacttc

SEQ ID NO: 1270 - RNA, 20 nt, synthetic construct
  source 1..20: mol_type = other RNA
tcagaatcagagatttcatg

SEQ ID NO: 1271 - RNA, 20 nt, synthetic construct
  source 1..20: mol_type = other RNA
agagatttcatgaggccaaa

SEQ ID NO: 1272 - RNA, 20 nt, synthetic construct
  source 1..20: mol_type = other RNA
caaaaggacagaagagcaac

SEQ ID NO: 1273 - RNA, 20 nt, synthetic construct
  source 1..20: mol_type = other RNA
cagttgctcttctgtccttt

SEQ ID NO: 1274 - RNA, 20 nt, synthetic construct
  source 1..20: mol_type = other RNA
agagcaactggtgagacact

SEQ ID NO: 1275 - RNA, 20 nt, synthetic construct
  source 1..20: mol_type = other RNA
gcaactggtgagacacttgg

SEQ ID NO: 1276 - RNA, 20 nt, synthetic construct
  source 1..20: mol_type = other RNA
gatctctgagtggaaagaac

SEQ ID NO: 1277 - RNA, 20 nt, synthetic construct
  source 1..20: mol_type = other RNA
gcgctggctcgatctctgag

SEQ ID NO: 1278 - RNA, 20 nt, synthetic construct
  source 1..20: mol_type = other RNA
ttcgaggcacatctctgcgc

SEQ ID NO: 1279 - RNA, 20 nt, synthetic construct
  source 1..20: mol_type = other RNA
gaaccacacaaagcacctca

SEQ ID NO: 1280 - RNA, 20 nt, synthetic construct
  source 1..20: mol_type = other RNA
gaggtgctttgtgtggttcg

SEQ ID NO: 1281 - RNA, 20 nt, synthetic construct
  source 1..20: mol_type = other RNA
gggccttgaggtgctttgtg

SEQ ID NO: 1282 - RNA, 20 nt, synthetic construct
  source 1..20: mol_type = other RNA
cctcaaggcccaagtgcgcc

SEQ ID NO: 1283 - RNA, 20 nt, synthetic construct
  source 1..20: mol_type = other RNA
ctcaaggcccaagtgcgccc

SEQ ID NO: 1284 - RNA, 20 nt, synthetic construct
  source 1..20: mol_type = other RNA
ccgggcgcacttgggccttg

SEQ ID NO: 1285 - RNA, 20 nt, synthetic construct
  source 1..20: mol_type = other RNA
caggaggcccgggcgcactt

SEQ ID NO: 1286 - RNA, 20 nt, synthetic construct
  source 1..20: mol_type = other RNA
gcaggaggcccgggcgcact

SEQ ID NO: 1287 - RNA, 20 nt, synthetic construct
  source 1..20: mol_type = other RNA
ggcctcctgcaagaacatcc

SEQ ID NO: 1288 - RNA, 20 nt, synthetic construct
  source 1..20: mol_type = other RNA
gatgttcttgcaggaggccc

SEQ ID NO: 1289 - RNA, 20 nt, synthetic construct
  source 1..20: mol_type = other RNA
ggatgttcttgcaggaggcc

SEQ ID NO: 1290 - RNA, 20 nt, synthetic construct
  source 1..20: mol_type = other RNA
ggccaggatgttcttgcagg

SEQ ID NO: 1291 - RNA, 20 nt, synthetic construct
  source 1..20: mol_type = other RNA
gcaggccaggatgttcttgc

SEQ ID NO: 1292 - RNA, 20 nt, synthetic construct
  source 1..20: mol_type = other RNA
catcctggcctgccgcagcg

SEQ ID NO: 1293 - RNA, 20 nt, synthetic construct
  source 1..20: mol_type = other RNA
gctcctcgctgcggcaggcc

SEQ ID NO: 1294 - RNA, 20 nt, synthetic construct
  source 1..20: mol_type = other RNA
ccgcagcgaggagctctgca

SEQ ID NO: 1295 - RNA, 20 nt, synthetic construct
  source 1..20: mol_type = other RNA
gcagagctcctcgctgcggc

SEQ ID NO: 1296 - RNA, 20 nt, synthetic construct
  source 1..20: mol_type = other RNA
ccatgcagagctcctcgctg

SEQ ID NO: 1297 - RNA, 20 nt, synthetic construct
  source 1..20: mol_type = other RNA
agtgtcagcatcccaaccag

SEQ ID NO: 1298 - RNA, 20 nt, synthetic construct
  source 1..20: mol_type = other RNA
tcagcatcccaaccagagga

SEQ ID NO: 1299 - RNA, 20 nt, synthetic construct
  source 1..20: mol_type = other RNA
cagcatcccaaccagaggat

SEQ ID NO: 1300 - RNA, 20 nt, synthetic construct
  source 1..20: mol_type = other RNA
cccaaccagaggatgggccc

SEQ ID NO: 1301 - RNA, 20 nt, synthetic construct
  source 1..20: mol_type = other RNA
ccaaccagaggatgggccct

SEQ ID NO: 1302 - RNA, 20 nt, synthetic construct
  source 1..20: mol_type = other RNA
caaccagaggatgggccctg

SEQ ID NO: 1303 - RNA, 20 nt, synthetic construct
  source 1..20: mol_type = other RNA
ccagggcccatcctctggtt

SEQ ID NO: 1304 - RNA, 20 nt, synthetic construct
  source 1..20: mol_type = other RNA
cccagggcccatcctctggt

SEQ ID NO: 1305 - RNA, 20 nt, synthetic construct
  source 1..20: mol_type = other RNA
ggatgggccctggggcccac

SEQ ID NO: 1306 - RNA, 20 nt, synthetic construct
  source 1..20: mol_type = other RNA
gatgggccctggggcccacc

SEQ ID NO: 1307 - RNA, 20 nt, synthetic construct
  source 1..20: mol_type = other RNA
atgggccctggggcccaccg

SEQ ID NO: 1308 - RNA, 20 nt, synthetic construct
  source 1..20: mol_type = other RNA
gctcaccccggtgggcccca

SEQ ID NO: 1309 - RNA, 20 nt, synthetic construct
  source 1..20: mol_type = other RNA
ggctcaccccggtgggcccc

SEQ ID NO: 1310 - RNA, 20 nt, synthetic construct
  source 1..20: mol_type = other RNA
gggggcaggctcaccccggt

SEQ ID NO: 1311 - RNA, 20 nt, synthetic construct
  source 1..20: mol_type = other RNA
cgggggcaggctcaccccgg

SEQ ID NO: 1312 - RNA, 20 nt, synthetic construct
  source 1..20: mol_type = other RNA
cttcgggggcaggctcaccc

SEQ ID NO: 1313 - RNA, 20 nt, synthetic construct
  source 1..20: mol_type = other RNA
ttgggggggtcttcgggggc

SEQ ID NO: 1314 - RNA, 20 nt, synthetic construct
  source 1..20: mol_type = other RNA
ctgcttgggggggtcttcgg

SEQ ID NO: 1315 - RNA, 20 nt, synthetic construct
  source 1..20: mol_type = other RNA
gctgcttgggggggtcttcg

SEQ ID NO: 1316 - RNA, 20 nt, synthetic construct
  source 1..20: mol_type = other RNA
cgctgcttgggggggtcttc

SEQ ID NO: 1317 - RNA, 20 nt, synthetic construct
  source 1..20: mol_type = other RNA
acgctgcttgggggggtctt

SEQ ID NO: 1318 - RNA, 20 nt, synthetic construct
  source 1..20: mol_type = other RNA
acccccccaagcagcgttgc

SEQ ID NO: 1319 - RNA, 20 nt, synthetic construct
  source 1..20: mol_type = other RNA
cccccccaagcagcgttgcc

SEQ ID NO: 1320 - RNA, 20 nt, synthetic construct
  source 1..20: mol_type = other RNA
cccggcaacgctgcttgggg

SEQ ID NO: 1321 - RNA, 20 nt, synthetic construct
  source 1..20: mol_type = other RNA
gcccggcaacgctgcttggg

SEQ ID NO: 1322 - RNA, 20 nt, synthetic construct
  source 1..20: mol_type = other RNA
ggcccggcaacgctgcttgg

SEQ ID NO: 1323 - RNA, 20 nt, synthetic construct
  source 1..20: mol_type = other RNA
gggcccggcaacgctgcttg

SEQ ID NO: 1324 - RNA, 20 nt, synthetic construct
  source 1..20: mol_type = other RNA
ggggcccggcaacgctgctt

SEQ ID NO: 1325 - RNA, 20 nt, synthetic construct
  source 1..20: mol_type = other RNA
gggggcccggcaacgctgct

SEQ ID NO: 1326 - RNA, 20 nt, synthetic construct
  source 1..20: mol_type = other RNA
gcccccgcctgtgatcattt

SEQ ID NO: 1327 - RNA, 20 nt, synthetic construct
  source 1..20: mol_type = other RNA
aatgatcacaggcgggggcc

SEQ ID NO: 1328 - RNA, 20 nt, synthetic construct
  source 1..20: mol_type = other RNA
gccaaaatgatcacaggcgg

SEQ ID NO: 1329 - RNA, 20 nt, synthetic construct
  source 1..20: mol_type = other RNA
tgccaaaatgatcacaggcg

SEQ ID NO: 1330 - RNA, 20 nt, synthetic construct
  source 1..20: mol_type = other RNA
ttgccaaaatgatcacaggc

SEQ ID NO: 1331 - RNA, 20 nt, synthetic construct
  source 1..20: mol_type = other RNA
attgccaaaatgatcacagg

SEQ ID NO: 1332 - RNA, 20 nt, synthetic construct
  source 1..20: mol_type = other RNA
ggcattgccaaaatgatcac

SEQ ID NO: 1333 - RNA, 20 nt, synthetic construct
  source 1..20: mol_type = other RNA
tttggcaatgccaagtgcaa

SEQ ID NO: 1334 - RNA, 20 nt, synthetic construct
  source 1..20: mol_type = other RNA
gttgcagtagccgttgcact

SEQ ID NO: 1335 - RNA, 20 nt, synthetic construct
  source 1..20: mol_type = other RNA
tttcagttcaagcagatgta

SEQ ID NO: 1336 - RNA, 20 nt, synthetic construct
  source 1..20: mol_type = other RNA
caagcagatgtatggctaac

SEQ ID NO: 1337 - RNA, 20 nt, synthetic construct
  source 1..20: mol_type = other RNA
atgtatggctaaccggaaac

SEQ ID NO: 1338 - RNA, 20 nt, synthetic construct
  source 1..20: mol_type = other RNA
tatggctaaccggaaacagg

SEQ ID NO: 1339 - RNA, 20 nt, synthetic construct
  source 1..20: mol_type = other RNA
atggctaaccggaaacaggt

SEQ ID NO: 1340 - RNA, 20 nt, synthetic construct
  source 1..20: mol_type = other RNA
ggaggtgacccacctgtttc

SEQ ID NO: 1341 - RNA, 20 nt, synthetic construct
  source 1..20: mol_type = other RNA
gggtcacctcctgcaagaag

SEQ ID NO: 1342 - RNA, 20 nt, synthetic construct
  source 1..20: mol_type = other RNA
ggtcacctcctgcaagaagt

SEQ ID NO: 1343 - RNA, 20 nt, synthetic construct
  source 1..20: mol_type = other RNA
gtcacctcctgcaagaagtg

SEQ ID NO: 1344 - RNA, 20 nt, synthetic construct
  source 1..20: mol_type = other RNA
gaggccccacttcttgcagg

SEQ ID NO: 1345 - RNA, 20 nt, synthetic construct
  source 1..20: mol_type = other RNA
ctcgaggccccacttcttgc

SEQ ID NO: 1346 - RNA, 20 nt, synthetic construct
  source 1..20: mol_type = other RNA
cctcgagctgtcagtcatca

SEQ ID NO: 1347 - RNA, 20 nt, synthetic construct
  source 1..20: mol_type = other RNA
ccatgatgactgacagctcg

SEQ ID NO: 1348 - RNA, 20 nt, synthetic construct
  source 1..20: mol_type = other RNA
gtggcagctgaggggttcag

SEQ ID NO: 1349 - RNA, 20 nt, synthetic construct
  source 1..20: mol_type = other RNA
ctcagctgccactgcaacag

SEQ ID NO: 1350 - RNA, 20 nt, synthetic construct
  source 1..20: mol_type = other RNA
tcagctgccactgcaacagt

SEQ ID NO: 1351 - RNA, 20 nt, synthetic construct
  source 1..20: mol_type = other RNA
ctgttgcagtggcagctgag

SEQ ID NO: 1352 - RNA, 20 nt, synthetic construct
  source 1..20: mol_type = other RNA
actgttgcagtggcagctga

SEQ ID NO: 1353 - RNA, 20 nt, synthetic construct
  source 1..20: mol_type = other RNA
cactgttgcagtggcagctg

SEQ ID NO: 1354 - RNA, 20 nt, synthetic construct
  source 1..20: mol_type = other RNA
ccactgcaacagtgggctta

SEQ ID NO: 1355 - RNA, 20 nt, synthetic construct
  source 1..20: mol_type = other RNA
cactgcaacagtgggcttaa

SEQ ID NO: 1356 - RNA, 20 nt, synthetic construct
  source 1..20: mol_type = other RNA
ccttaagcccactgttgcag

SEQ ID NO: 1357 - RNA, 20 nt, synthetic construct
  source 1..20: mol_type = other RNA
gggcttaagggtgtctgagc

SEQ ID NO: 1358 - RNA, 20 nt, synthetic construct
  source 1..20: mol_type = other RNA
taagggtgtctgagcaggag

SEQ ID NO: 1359 - RNA, 20 nt, synthetic construct
  source 1..20: mol_type = other RNA
gaggaaagataagctcttcg

SEQ ID NO: 1360 - RNA, 20 nt, synthetic construct
  source 1..20: mol_type = other RNA
tcgtggtgcccacgatgctc

SEQ ID NO: 1361 - RNA, 20 nt, synthetic construct
  source 1..20: mol_type = other RNA
gtgcccacgatgctcaggtt

SEQ ID NO: 1362 - RNA, 20 nt, synthetic construct
  source 1..20: mol_type = other RNA
gatgctcaggtttggtaacc

SEQ ID NO: 1363 - RNA, 20 nt, synthetic construct
  source 1..20: mol_type = other RNA
atgctcaggtttggtaaccc

SEQ ID NO: 1364 - RNA, 20 nt, synthetic construct
  source 1..20: mol_type = other RNA
ggtaacccgggagtgttccc

SEQ ID NO: 1365 - RNA, 20 nt, synthetic construct
  source 1..20: mol_type = other RNA
aacccgggagtgttcccagg

SEQ ID NO: 1366 - RNA, 20 nt, synthetic construct
  source 1..20: mol_type = other RNA
ggccacctgggaacactccc

SEQ ID NO: 1367 - RNA, 20 nt, synthetic construct
  source 1..20: mol_type = other RNA
aggccacctgggaacactcc

SEQ ID NO: 1368 - RNA, 20 nt, synthetic construct
  source 1..20: mol_type = other RNA
tttgctttctaaggccacct

SEQ ID NO: 1369 - RNA, 20 nt, synthetic construct
  source 1..20: mol_type = other RNA
ctttgctttctaaggccacc

SEQ ID NO: 1370 - RNA, 20 nt, synthetic construct
  source 1..20: mol_type = other RNA
tagaaagcaaagcttgtaac

SEQ ID NO: 1371 - RNA, 20 nt, synthetic construct
  source 1..20: mol_type = other RNA
gttacaagctttgctttcta

SEQ ID NO: 1372 - RNA, 20 nt, synthetic construct
  source 1..20: mol_type = other RNA
agcaaagcttgtaactggca

SEQ ID NO: 1373 - RNA, 20 nt, synthetic construct
  source 1..20: mol_type = other RNA
gcaaagcttgtaactggcaa

SEQ ID NO: 1374 - RNA, 20 nt, synthetic construct
  source 1..20: mol_type = other RNA
atgatgtcagattcagccca

SEQ ID NO: 1375 - RNA, 20 nt, synthetic construct
  source 1..20: mol_type = other RNA
ggtaggagaggaggaacctt

SEQ ID NO: 1376 - RNA, 20 nt, synthetic construct
  source 1..20: mol_type = other RNA
tggtaggagaggaggaacct

SEQ ID NO: 1377 - RNA, 20 nt, synthetic construct
  source 1..20: mol_type = other RNA
ttcctcctctcctaccaagc

SEQ ID NO: 1378 - RNA, 20 nt, synthetic construct
  source 1..20: mol_type = other RNA
ctcctctcctaccaagcagg

SEQ ID NO: 1379 - RNA, 20 nt, synthetic construct
  source 1..20: mol_type = other RNA
ctcctgcttggtaggagagg

SEQ ID NO: 1380 - RNA, 20 nt, synthetic construct
  source 1..20: mol_type = other RNA
ctcctaccaagcaggaggcc

SEQ ID NO: 1381 - RNA, 20 nt, synthetic construct
  source 1..20: mol_type = other RNA
ggcctcctgcttggtaggag

SEQ ID NO: 1382 - RNA, 20 nt, synthetic construct
  source 1..20: mol_type = other RNA
ttcctggcctcctgcttggt

SEQ ID NO: 1383 - RNA, 20 nt, synthetic construct
  source 1..20: mol_type = other RNA
caggaggccaggaacttctt

SEQ ID NO: 1384 - RNA, 20 nt, synthetic construct
  source 1..20: mol_type = other RNA
gccaggaacttctttggact

SEQ ID NO: 1385 - RNA, 20 nt, synthetic construct
  source 1..20: mol_type = other RNA
ggaacttctttggacttgga

SEQ ID NO: 1386 - RNA, 20 nt, synthetic construct
  source 1..20: mol_type = other RNA
tccaagtccaaagaagttcc

SEQ ID NO: 1387 - RNA, 20 nt, synthetic construct
  source 1..20: mol_type = other RNA
ctttggacttggaaggtgtg

SEQ ID NO: 1388 - RNA, 20 nt, synthetic construct
  source 1..20: mol_type = other RNA
tttggacttggaaggtgtgc

SEQ ID NO: 1389 - RNA, 20 nt, synthetic construct
  source 1..20: mol_type = other RNA
ttggacttggaaggtgtgcg

SEQ ID NO: 1390 - RNA, 20 nt, synthetic construct
  source 1..20: mol_type = other RNA
cttggaaggtgtgcggggac

SEQ ID NO: 1391 - RNA, 20 nt, synthetic construct
  source 1..20: mol_type = other RNA
aggtgtgcggggactggccg

SEQ ID NO: 1392 - RNA, 20 nt, synthetic construct
  source 1..20: mol_type = other RNA
gcccctgcaccctgcgcatc

SEQ ID NO: 1393 - RNA, 20 nt, synthetic construct
  source 1..20: mol_type = other RNA
tcctgatgcgcagggtgcag

SEQ ID NO: 1394 - RNA, 20 nt, synthetic construct
  source 1..20: mol_type = other RNA
gtcctgatgcgcagggtgca

SEQ ID NO: 1395 - RNA, 20 nt, synthetic construct
  source 1..20: mol_type = other RNA
agtcctgatgcgcagggtgc

SEQ ID NO: 1396 - RNA, 20 nt, synthetic construct
  source 1..20: mol_type = other RNA
tgaagcagtcctgatgcgca

SEQ ID NO: 1397 - RNA, 20 nt, synthetic construct
  source 1..20: mol_type = other RNA
atgaagcagtcctgatgcgc

SEQ ID NO: 1398 - RNA, 20 nt, synthetic construct
  source 1..20: mol_type = other RNA
tcaggactgcttcatcgtct

SEQ ID NO: 1399 - RNA, 20 nt, synthetic construct
  source 1..20: mol_type = other RNA
ttcatcgtcttggctgagaa

SEQ ID NO: 1400 - RNA, 20 nt, synthetic construct
  source 1..20: mol_type = other RNA
tcatcgtcttggctgagaaa

SEQ ID NO: 1401 - RNA, 20 nt, synthetic construct
  source 1..20: mol_type = other RNA
gaaaagacacacaagtcgcg

SEQ ID NO: 1402 - RNA, 20 nt, synthetic construct
  source 1..20: mol_type = other RNA
aaaagacacacaagtcgcgt

SEQ ID NO: 1403 - RNA, 20 nt, synthetic construct
  source 1..20: mol_type = other RNA
gacacacaagtcgcgtgggt

SEQ ID NO: 1404 - RNA, 20 nt, synthetic construct
  source 1..20: mol_type = other RNA
gaggggaggtggaatggctc

SEQ ID NO: 1405 - RNA, 20 nt, synthetic construct
  source 1..20: mol_type = other RNA
ctgggggaggggaggtggaa

SEQ ID NO: 1406 - RNA, 20 nt, synthetic construct
  source 1..20: mol_type = other RNA
agatgctgggggaggggagg

SEQ ID NO: 1407 - RNA, 20 nt, synthetic construct
  source 1..20: mol_type = other RNA
gagagatgctgggggagggg

SEQ ID NO: 1408 - RNA, 20 nt, synthetic construct
  source 1..20: mol_type = other RNA
tctgagagatgctgggggag

SEQ ID NO: 1409 - RNA, 20 nt, synthetic construct
  source 1..20: mol_type = other RNA
ctctgagagatgctggggga

SEQ ID NO: 1410 - RNA, 20 nt, synthetic construct
  source 1..20: mol_type = other RNA
tctctgagagatgctggggg

SEQ ID NO: 1411 - RNA, 20 nt, synthetic construct
  source 1..20: mol_type = other RNA
acatctctgagagatgctgg

SEQ ID NO: 1412 - RNA, 20 nt, synthetic construct
  source 1..20: mol_type = other RNA
cacatctctgagagatgctg

SEQ ID NO: 1413 - RNA, 20 nt, synthetic construct
  source 1..20: mol_type = other RNA
tcacatctctgagagatgct

SEQ ID NO: 1414 - RNA, 20 nt, synthetic construct
  source 1..20: mol_type = other RNA
ttcacatctctgagagatgc

SEQ ID NO: 1415 - RNA, 20 nt, synthetic construct
  source 1..20: mol_type = other RNA
gatgtgaagccagatcctca

SEQ ID NO: 1416 - RNA, 20 nt, synthetic construct
  source 1..20: mol_type = other RNA
gccagatcctcatggcagcg

SEQ ID NO: 1417 - RNA, 20 nt, synthetic construct
  source 1..20: mol_type = other RNA
gcctcgctgccatgaggatc

SEQ ID NO: 1418 - RNA, 20 nt, synthetic construct
  source 1..20: mol_type = other RNA
cagagggcctcgctgccatg

SEQ ID NO: 1419 - RNA, 20 nt, synthetic construct
  source 1..20: mol_type = other RNA
ggccctctgcaagaagctca

SEQ ID NO: 1420 - RNA, 20 nt, synthetic construct
  source 1..20: mol_type = other RNA
ttccttgagcttcttgcaga

SEQ ID NO: 1421 - RNA, 20 nt, synthetic construct
  source 1..20: mol_type = other RNA
cttccttgagcttcttgcag

SEQ ID NO: 1422 - RNA, 20 nt, synthetic construct
  source 1..20: mol_type = other RNA
caagaagctcaaggaagctc

SEQ ID NO: 1423 - RNA, 20 nt, synthetic construct
  source 1..20: mol_type = other RNA
aagaagctcaaggaagctca

SEQ ID NO: 1424 - RNA, 20 nt, synthetic construct
  source 1..20: mol_type = other RNA
tcaaggaagctcagggaaaa

SEQ ID NO: 1425 - RNA, 20 nt, synthetic construct
  source 1..20: mol_type = other RNA
cagagagtgtttgtagttca

SEQ ID NO: 1426 - RNA, 20 nt, synthetic construct
  source 1..20: mol_type = other RNA
atggtttttccctacctgcc

SEQ ID NO: 1427 - RNA, 20 nt, synthetic construct
  source 1..20: mol_type = other RNA
cctgcccggttcctttcctg

SEQ ID NO: 1428 - RNA, 20 nt, synthetic construct
  source 1..20: mol_type = other RNA
aggaaaggaaccgggcaggt

SEQ ID NO: 1429 - RNA, 20 nt, synthetic construct
  source 1..20: mol_type = other RNA
cctcaggaaaggaaccgggc

SEQ ID NO: 1430 - RNA, 20 nt, synthetic construct
  source 1..20: mol_type = other RNA
cggttcctttcctgaggacc

SEQ ID NO: 1431 - RNA, 20 nt, synthetic construct
  source 1..20: mol_type = other RNA
gggtcctcaggaaaggaacc

SEQ ID NO: 1432 - RNA, 20 nt, synthetic construct
  source 1..20: mol_type = other RNA
cgggtcctcaggaaaggaac

SEQ ID NO: 1433 - RNA, 20 nt, synthetic construct
  source 1..20: mol_type = other RNA
ttctgccgggtcctcaggaa

SEQ ID NO: 1434 - RNA, 20 nt, synthetic construct
  source 1..20: mol_type = other RNA
tgcatttctgccgggtcctc

SEQ ID NO: 1435 - RNA, 20 nt, synthetic construct
  source 1..20: mol_type = other RNA
cagaaatgcagaaccatcca

SEQ ID NO: 1436 - RNA, 20 nt, synthetic construct
  source 1..20: mol_type = other RNA
ggatggttctgcatttctgc

SEQ ID NO: 1437 - RNA, 20 nt, synthetic construct
  source 1..20: mol_type = other RNA
atccatggactgtgattctg

SEQ ID NO: 1438 - RNA, 20 nt, synthetic construct
  source 1..20: mol_type = other RNA
tcagaatcacagtccatgga

SEQ ID NO: 1439 - RNA, 20 nt, synthetic construct
  source 1..20: mol_type = other RNA
agcctcagaatcacagtcca

SEQ ID NO: 1440 - RNA, 20 nt, synthetic construct
  source 1..20: mol_type = other RNA
aaatattctaattttttaaa

SEQ ID NO: 1441 - RNA, 20 nt, synthetic construct
  source 1..20: mol_type = other RNA
aaaaaattagaatattttac

SEQ ID NO: 1442 - RNA, 20 nt, synthetic construct
  source 1..20: mol_type = other RNA
aaaaattagaatattttact

SEQ ID NO: 1443 - RNA, 20 nt, synthetic construct
  source 1..20: mol_type = other RNA
tgggaagacgtgtaactctt

SEQ ID NO: 1444 - RNA, 20 nt, synthetic construct
  source 1..20: mol_type = other RNA
gggaagacgtgtaactcttt

SEQ ID NO: 1445 - RNA, 20 nt, synthetic construct
  source 1..20: mol_type = other RNA
aaagaagttagcttgaactg

SEQ ID NO: 1446 - RNA, 20 nt, synthetic construct
  source 1..20: mol_type = other RNA
atacccttacattatgtatg

SEQ ID NO: 1447 - RNA, 20 nt, synthetic construct
  source 1..20: mol_type = other RNA
tacccttacattatgtatga

SEQ ID NO: 1448 - RNA, 20 nt, synthetic construct
  source 1..20: mol_type = other RNA
atccctcatacataatgtaa

SEQ ID NO: 1449 - RNA, 20 nt, synthetic construct
  source 1..20: mol_type = other RNA
aatccctcatacataatgta

SEQ ID NO: 1450 - RNA, 20 nt, synthetic construct
  source 1..20: mol_type = other RNA
tgctgccctagaagtacaat

SEQ ID NO: 1451 - RNA, 20 nt, synthetic construct
  source 1..20: mol_type = other RNA
gccctagaagtacaatagga

SEQ ID NO: 1452 - RNA, 20 nt, synthetic construct
  source 1..20: mol_type = other RNA
gccttcctattgtacttcta

SEQ ID NO: 1453 - RNA, 20 nt, synthetic construct
  source 1..20: mol_type = other RNA
agccttcctattgtacttct

SEQ ID NO: 1454 - RNA, 20 nt, synthetic construct
  source 1..20: mol_type = other RNA
aataataataacctgttttc

SEQ ID NO: 1455 - RNA, 20 nt, synthetic construct
  source 1..20: mol_type = other RNA
acctgttttctggttgttgt

SEQ ID NO: 1456 - RNA, 20 nt, synthetic construct
  source 1..20: mol_type = other RNA
cctgttttctggttgttgtt

SEQ ID NO: 1457 - RNA, 20 nt, synthetic construct
  source 1..20: mol_type = other RNA
ctgttttctggttgttgttg

SEQ ID NO: 1458 - RNA, 20 nt, synthetic construct
  source 1..20: mol_type = other RNA
cccaacaacaaccagaaaac

SEQ ID NO: 1459 - RNA, 20 nt, synthetic construct
  source 1..20: mol_type = other RNA
tcaaccagctgcctttttaa

SEQ ID NO: 1460 - RNA, 20 nt, synthetic construct
  source 1..20: mol_type = other RNA
caaccagctgcctttttaaa

SEQ ID NO: 1461 - RNA, 20 nt, synthetic construct
  source 1..20: mol_type = other RNA
gctccctttaaaaaggcagc

SEQ ID NO: 1462 - RNA, 20 nt, synthetic construct
  source 1..20: mol_type = other RNA
gactagagctccctttaaaa

SEQ ID NO: 1463 - RNA, 20 nt, synthetic construct
  source 1..20: mol_type = other RNA
ataaagtgaattacacaaaa

SEQ ID NO: 1464 - RNA, 20 nt, synthetic construct
  source 1..20: mol_type = other RNA
tgaagatatttcttcagctc

SEQ ID NO: 1465 - RNA, 20 nt, synthetic construct
  source 1..20: mol_type = other RNA
gaagatatttcttcagctct

SEQ ID NO: 1466 - RNA, 20 nt, synthetic construct
  source 1..20: mol_type = other RNA
aagatatttcttcagctctg

SEQ ID NO: 1467 - RNA, 20 nt, synthetic construct
  source 1..20: mol_type = other RNA
gttctctcaggagaacactg

SEQ ID NO: 1468 - RNA, 20 nt, synthetic construct
  source 1..20: mol_type = other RNA
caaagcaaggatgttctctc

SEQ ID NO: 1469 - RNA, 20 nt, synthetic construct
  source 1..20: mol_type = other RNA
gaacatccttgctttgagtc

SEQ ID NO: 1470 - RNA, 20 nt, synthetic construct
  source 1..20: mol_type = other RNA
ccttgctttgagtcaggctg

SEQ ID NO: 1471 - RNA, 20 nt, synthetic construct
  source 1..20: mol_type = other RNA
cttgctttgagtcaggctgt

SEQ ID NO: 1472 - RNA, 20 nt, synthetic construct
  source 1..20: mol_type = other RNA
ccacagcctgactcaaagca

SEQ ID NO: 1473 - RNA, 20 nt, synthetic construct
  source 1..20: mol_type = other RNA
gtgggcaagttcctgaccac

SEQ ID NO: 1474 - RNA, 20 nt, synthetic construct
  source 1..20: mol_type = other RNA
tgggcaagttcctgaccaca

SEQ ID NO: 1475 - RNA, 20 nt, synthetic construct
  source 1..20: mol_type = other RNA
cctgaccacagggagtaaat

SEQ ID NO: 1476 - RNA, 20 nt, synthetic construct
  source 1..20: mol_type = other RNA
ccaatttactccctgtggtc

SEQ ID NO: 1477 - RNA, 20 nt, synthetic construct
  source 1..20: mol_type = other RNA
agaggccaatttactccctg

SEQ ID NO: 1478 - RNA, 20 nt, synthetic construct
  source 1..20: mol_type = other RNA
caagcaaaagtgtatcaaag

SEQ ID NO: 1479 - RNA, 20 nt, synthetic construct
  source 1..20: mol_type = other RNA
acacttttgcttgcctcccc

SEQ ID NO: 1480 - RNA, 20 nt, synthetic construct
  source 1..20: mol_type = other RNA
gcttgcctccccaggaaaga

SEQ ID NO: 1481 - RNA, 20 nt, synthetic construct
  source 1..20: mol_type = other RNA
caattccttctttcctgggg

SEQ ID NO: 1482 - RNA, 20 nt, synthetic construct
  source 1..20: mol_type = other RNA
atgcaattccttctttcctg

SEQ ID NO: 1483 - RNA, 20 nt, synthetic construct
  source 1..20: mol_type = other RNA
gaaagaaggaattgcatcca

SEQ ID NO: 1484 - RNA, 20 nt, synthetic construct
  source 1..20: mol_type = other RNA
ggatgcaattccttctttcc

SEQ ID NO: 1485 - RNA, 20 nt, synthetic construct
  source 1..20: mol_type = other RNA
atgaatatgtatgtatacct

SEQ ID NO: 1486 - RNA, 20 nt, synthetic construct
  source 1..20: mol_type = other RNA
tacatagctggagtttcata

SEQ ID NO: 1487 - RNA, 20 nt, synthetic construct
  source 1..20: mol_type = other RNA
atagttttttattacatagc

SEQ ID NO: 1488 - RNA, 20 nt, synthetic construct
  source 1..20: mol_type = other RNA
ctctgagtgtcctacctcct

SEQ ID NO: 1489 - RNA, 20 nt, synthetic construct
  source 1..20: mol_type = other RNA
caaggaggtaggacactcag

SEQ ID NO: 1490 - RNA, 20 nt, synthetic construct
  source 1..20: mol_type = other RNA
tacctccttggagatgagat

SEQ ID NO: 1491 - RNA, 20 nt, synthetic construct
  source 1..20: mol_type = other RNA
acctccttggagatgagata

SEQ ID NO: 1492 - RNA, 20 nt, synthetic construct
  source 1..20: mol_type = other RNA
tatctcatctccaaggaggt

SEQ ID NO: 1493 - RNA, 20 nt, synthetic construct
  source 1..20: mol_type = other RNA
ccttggagatgagataggga

SEQ ID NO: 1494 - RNA, 20 nt, synthetic construct
  source 1..20: mol_type = other RNA
tccctatctcatctccaagg

SEQ ID NO: 1495 - RNA, 20 nt, synthetic construct
  source 1..20: mol_type = other RNA
ccttccctatctcatctcca

SEQ ID NO: 1496 - RNA, 20 nt, synthetic construct
  source 1..20: mol_type = other RNA
agatgagatagggaaggagc

SEQ ID NO: 1497 - RNA, 20 nt, synthetic construct
  source 1..20: mol_type = other RNA
gatgagatagggaaggagca

SEQ ID NO: 1498 - RNA, 20 nt, synthetic construct
  source 1..20: mol_type = other RNA
ggaaggagcagggatgagac

SEQ ID NO: 1499 - RNA, 20 nt, synthetic construct
  source 1..20: mol_type = other RNA
agcagggatgagactggcaa

SEQ ID NO: 1500 - RNA, 20 nt, synthetic construct
  source 1..20: mol_type = other RNA
atgagactggcaatggtcac

SEQ ID NO: 1501 - RNA, 20 nt, synthetic construct
  source 1..20: mol_type = other RNA
tgagactggcaatggtcaca

SEQ ID NO: 1502 - RNA, 20 nt, synthetic construct
  source 1..20: mol_type = other RNA
aatggtcacagggaaagatg

SEQ ID NO: 1503 - RNA, 20 nt, synthetic construct
  source 1..20: mol_type = other RNA
aaagatgtggccttttgtga

SEQ ID NO: 1504 - RNA, 20 nt, synthetic construct
  source 1..20: mol_type = other RNA
gaaaataaaaccatcacaaa

SEQ ID NO: 1505 - RNA, 20 nt, synthetic construct
  source 1..20: mol_type = other RNA
tttctgttaacactgtgtcc

SEQ ID NO: 1506 - RNA, 20 nt, synthetic construct
  source 1..20: mol_type = other RNA
ttctgttaacactgtgtcct

SEQ ID NO: 1507 - RNA, 20 nt, synthetic construct
  source 1..20: mol_type = other RNA
tctgttaacactgtgtcctg

SEQ ID NO: 1508 - RNA, 20 nt, synthetic construct
  source 1..20: mol_type = other RNA
ctgttaacactgtgtcctgg

SEQ ID NO: 1509 - RNA, 20 nt, synthetic construct
  source 1..20: mol_type = other RNA
tgttaacactgtgtcctggg

SEQ ID NO: 1510 - RNA, 20 nt, synthetic construct
  source 1..20: mol_type = other RNA
gttaacactgtgtcctgggg

SEQ ID NO: 1511 - RNA, 20 nt, synthetic construct
  source 1..20: mol_type = other RNA
acactgtgtcctgggggggc

SEQ ID NO: 1512 - RNA, 20 nt, synthetic construct
  source 1..20: mol_type = other RNA
cactgtgtcctgggggggct

SEQ ID NO: 1513 - RNA, 20 nt, synthetic construct
  source 1..20: mol_type = other RNA
ggggacttcccagccccccc

SEQ ID NO: 1514 - RNA, 20 nt, synthetic construct
  source 1..20: mol_type = other RNA
gggaagtcccctgcatccca

SEQ ID NO: 1515 - RNA, 20 nt, synthetic construct
  source 1..20: mol_type = other RNA
ccctgcatcccatggtaccc

SEQ ID NO: 1516 - RNA, 20 nt, synthetic construct
  source 1..20: mol_type = other RNA
cagggtaccatgggatgcag

SEQ ID NO: 1517 - RNA, 20 nt, synthetic construct
  source 1..20: mol_type = other RNA
ccagggtaccatgggatgca

SEQ ID NO: 1518 - RNA, 20 nt, synthetic construct
  source 1..20: mol_type = other RNA
atcccatggtaccctggtat

SEQ ID NO: 1519 - RNA, 20 nt, synthetic construct
  source 1..20: mol_type = other RNA
tcccatggtaccctggtatt

SEQ ID NO: 1520 - RNA, 20 nt, synthetic construct
  source 1..20: mol_type = other RNA
tcccaataccagggtaccat

SEQ ID NO: 1521 - RNA, 20 nt, synthetic construct
  source 1..20: mol_type = other RNA
gtcccaataccagggtacca

SEQ ID NO: 1522 - RNA, 20 nt, synthetic construct
  source 1..20: mol_type = other RNA
cttttgctgtcccaatacca

SEQ ID NO: 1523 - RNA, 20 nt, synthetic construct
  source 1..20: mol_type = other RNA
gcttttgctgtcccaatacc

SEQ ID NO: 1524 - RNA, 20 nt, synthetic construct
  source 1..20: mol_type = other RNA
agccagtaaccatgagtatg

SEQ ID NO: 1525 - RNA, 20 nt, synthetic construct
  source 1..20: mol_type = other RNA
ttcctcatactcatggttac

SEQ ID NO: 1526 - RNA, 20 nt, synthetic construct
  source 1..20: mol_type = other RNA
aagagatttcctcatactca

SEQ ID NO: 1527 - RNA, 20 nt, synthetic construct
  source 1..20: mol_type = other RNA
aggaaatctctttctgttgc

SEQ ID NO: 1528 - RNA, 20 nt, synthetic construct
  source 1..20: mol_type = other RNA
cagtttctctgtgtgctttg

SEQ ID NO: 1529 - RNA, 20 nt, synthetic construct
  source 1..20: mol_type = other RNA
ctctagaagaaaaaaaaaaa

SEQ ID NO: 1530 - RNA, 20 nt, synthetic construct
  source 1..20: mol_type = other RNA
tagaagaaaaaaaaaaaagg

SEQ ID NO: 1531 - RNA, 20 nt, synthetic construct
  source 1..20: mol_type = other RNA
agaagaaaaaaaaaaaagga

SEQ ID NO: 1532 - RNA, 20 nt, synthetic construct
  source 1..20: mol_type = other RNA
gaagaaaaaaaaaaaaggag

SEQ ID NO: 1533 - RNA, 20 nt, synthetic construct
  source 1..20: mol_type = other RNA
tgcattttccccagagataa

SEQ ID NO: 1534 - RNA, 20 nt, synthetic construct
  source 1..20: mol_type = other RNA
agagataaaggctgccattt

SEQ ID NO: 1535 - RNA, 20 nt, synthetic construct
  source 1..20: mol_type = other RNA
gagataaaggctgccatttt

SEQ ID NO: 1536 - RNA, 20 nt, synthetic construct
  source 1..20: mol_type = other RNA
agataaaggctgccattttg

SEQ ID NO: 1537 - RNA, 20 nt, synthetic construct
  source 1..20: mol_type = other RNA
gataaaggctgccattttgg

SEQ ID NO: 1538 - RNA, 20 nt, synthetic construct
  source 1..20: mol_type = other RNA
attttgggggtctgtactta

SEQ ID NO: 1539 - RNA, 20 nt, synthetic construct
  source 1..20: mol_type = other RNA
ataagtacagacccccaaaa

SEQ ID NO: 1540 - RNA, 20 nt, synthetic construct
  source 1..20: mol_type = other RNA
tatggatcacaaatattttc

SEQ ID NO: 1541 - RNA, 20 nt, synthetic construct
  source 1..20: mol_type = other RNA
gtaaaggctgtgtagagtta

SEQ ID NO: 1542 - RNA, 20 nt, synthetic construct
  source 1..20: mol_type = other RNA
cagcctttactcatactatt

SEQ ID NO: 1543 - RNA, 20 nt, synthetic construct
  source 1..20: mol_type = other RNA
gtgcctaatagtatgagtaa

SEQ ID NO: 1544 - RNA, 20 nt, synthetic construct
  source 1..20: mol_type = other RNA
aaaacttagggggctctaag

SEQ ID NO: 1545 - RNA, 20 nt, synthetic construct
  source 1..20: mol_type = other RNA
aaaaacttagggggctctaa

SEQ ID NO: 1546 - RNA, 20 nt, synthetic construct
  source 1..20: mol_type = other RNA
gaaaaacttagggggctcta

SEQ ID NO: 1547 - RNA, 20 nt, synthetic construct
  source 1..20: mol_type = other RNA
tcgtctgggaaaaacttagg

SEQ ID NO: 1548 - RNA, 20 nt, synthetic construct
  source 1..20: mol_type = other RNA
ttcgtctgggaaaaacttag

SEQ ID NO: 1549 - RNA, 20 nt, synthetic construct
  source 1..20: mol_type = other RNA
attcgtctgggaaaaactta

SEQ ID NO: 1550 - RNA, 20 nt, synthetic construct
  source 1..20: mol_type = other RNA
gattcgtctgggaaaaactt

SEQ ID NO: 1551 - RNA, 20 nt, synthetic construct
  source 1..20: mol_type = other RNA
gaaattataaagattcgtct

SEQ ID NO: 1552 - RNA, 20 nt, synthetic construct
  source 1..20: mol_type = other RNA
agaaattataaagattcgtc

SEQ ID NO: 1553 - RNA, 20 nt, synthetic construct
  source 1..20: mol_type = other RNA
tgaagtttatttggtatctt

SEQ ID NO: 1554 - RNA, 20 nt, synthetic construct
  source 1..20: mol_type = other RNA
tgaaaacactgaagtttatt

SEQ ID NO: 1555 - RNA, 20 nt, synthetic construct
  source 1..20: mol_type = other RNA
actttttttcacattaagaa

SEQ ID NO: 1556 - RNA, 20 nt, synthetic construct
  source 1..20: mol_type = other RNA
gaataggtggctttctatta

SEQ ID NO: 1557 - RNA, 20 nt, synthetic construct
  source 1..20: mol_type = other RNA
agaataggtggctttctatt

SEQ ID NO: 1558 - RNA, 20 nt, synthetic construct
  source 1..20: mol_type = other RNA
gaaagccacctattctttgt

SEQ ID NO: 1559 - RNA, 20 nt, synthetic construct
  source 1..20: mol_type = other RNA
gaaatccaacaaagaatagg

SEQ ID NO: 1560 - RNA, 20 nt, synthetic construct
  source 1..20: mol_type = other RNA
gaagaaatccaacaaagaat

SEQ ID NO: 1561 - RNA, 20 nt, synthetic construct
  source 1..20: mol_type = other RNA
tgtcatagccgagaacaatg

SEQ ID NO: 1562 - DNA, 28 bp, synthetic construct
  source 1..28: mol_type = other DNA
tgaaaaaaaggagaaatacaatttgggg

SEQ ID NO: 1563 - DNA, 28 bp, synthetic construct
  source 1..28: mol_type = other DNA
atgaaaaaaaggagaaatacaatttggg

SEQ ID NO: 1564 - DNA, 28 bp, synthetic construct
  source 1..28: mol_type = other DNA
tatgaaaaaaaggagaaatacaatttgg

SEQ ID NO: 1565 - DNA, 28 bp, synthetic construct
  source 1..28: mol_type = other DNA
tgtatttctcctttttttcataagaagg

SEQ ID NO: 1566 - DNA, 28 bp, synthetic construct
  source 1..28: mol_type = other DNA
gatggaatgccttcttatgaaaaaaagg

SEQ ID NO: 1567 - DNA, 28 bp, synthetic construct
  source 1..28: mol_type = other DNA
aaagaagagaaggagagagtatagatgg

SEQ ID NO: 1568 - DNA, 28 bp, synthetic construct
  source 1..28: mol_type = other DNA
aatcagaaggaaagaaaagaagagaagg

SEQ ID NO: 1569 - DNA, 28 bp, synthetic construct
  source 1..28: mol_type = other DNA
atgacaattttcttggtgaatcagaagg

SEQ ID NO: 1570 - DNA, 28 bp, synthetic construct
  source 1..28: mol_type = other DNA
tctgattcaccaagaaaattgtcattgg

SEQ ID NO: 1571 - DNA, 28 bp, synthetic construct
  source 1..28: mol_type = other DNA
tggacaagaccaatgacaattttcttgg

SEQ ID NO: 1572 - DNA, 28 bp, synthetic construct
  source 1..28: mol_type = other DNA
tcttgtccatgtgttacataatagaagg

SEQ ID NO: 1573 - DNA, 28 bp, synthetic construct
  source 1..28: mol_type = other DNA
cttgtccatgtgttacataatagaaggg

SEQ ID NO: 1574 - DNA, 28 bp, synthetic construct
  source 1..28: mol_type = other DNA
ttgtccatgtgttacataatagaagggg

SEQ ID NO: 1575 - DNA, 28 bp, synthetic construct
  source 1..28: mol_type = other DNA
ttttccccttctattatgtaacacatgg

SEQ ID NO: 1576 - DNA, 28 bp, synthetic construct
  source 1..28: mol_type = other DNA
atgtgttacataatagaaggggaaaagg

SEQ ID NO: 1577 - DNA, 28 bp, synthetic construct
  source 1..28: mol_type = other DNA
ttacataatagaaggggaaaaggcaagg

SEQ ID NO: 1578 - DNA, 28 bp, synthetic construct
  source 1..28: mol_type = other DNA
tacataatagaaggggaaaaggcaaggg

SEQ ID NO: 1579 - DNA, 28 bp, synthetic construct
  source 1..28: mol_type = other DNA
cagcccaacacagcgctgatttagaagg

SEQ ID NO: 1580 - DNA, 28 bp, synthetic construct
  source 1..28: mol_type = other DNA
cccaacacagcgctgatttagaaggtgg

SEQ ID NO: 1581 - DNA, 28 bp, synthetic construct
  source 1..28: mol_type = other DNA
tccaccttctaaatcagcgctgtgttgg

SEQ ID NO: 1582 - DNA, 28 bp, synthetic construct
  source 1..28: mol_type = other DNA
cacagcgctgatttagaaggtggaaagg

SEQ ID NO: 1583 - DNA, 28 bp, synthetic construct
  source 1..28: mol_type = other DNA
ggtggaaaggacagtaaagaccgcctgg

SEQ ID NO: 1584 - DNA, 28 bp, synthetic construct
  source 1..28: mol_type = other DNA
ggaaaggacagtaaagaccgcctggtgg

SEQ ID NO: 1585 - DNA, 28 bp, synthetic construct
  source 1..28: mol_type = other DNA
aaggacagtaaagaccgcctggtggtgg

SEQ ID NO: 1586 - DNA, 28 bp, synthetic construct
  source 1..28: mol_type = other DNA
aggacagtaaagaccgcctggtggtggg

SEQ ID NO: 1587 - DNA, 28 bp, synthetic construct
  source 1..28: mol_type = other DNA
agtaaagaccgcctggtggtgggagtgg

SEQ ID NO: 1588 - DNA, 28 bp, synthetic construct
  source 1..28: mol_type = other DNA
gtgaattgccactcccaccaccaggcgg

SEQ ID NO: 1589 - DNA, 28 bp, synthetic construct
  source 1..28: mol_type = other DNA
cttgtgaattgccactcccaccaccagg

SEQ ID NO: 1590 - DNA, 28 bp, synthetic construct
  source 1..28: mol_type = other DNA
attcacaagcccagcagtagaatcatgg

SEQ ID NO: 1591 - DNA, 28 bp, synthetic construct
  source 1..28: mol_type = other DNA
agcccagcagtagaatcatggaaagtgg

SEQ ID NO: 1592 - DNA, 28 bp, synthetic construct
  source 1..28: mol_type = other DNA
ctccactttccatgattctactgctggg

SEQ ID NO: 1593 - DNA, 28 bp, synthetic construct
  source 1..28: mol_type = other DNA
actccactttccatgattctactgctgg

SEQ ID NO: 1594 - DNA, 28 bp, synthetic construct
  source 1..28: mol_type = other DNA
ggaaagtggagttcgaacataatccagg

SEQ ID NO: 1595 - DNA, 28 bp, synthetic construct
  source 1..28: mol_type = other DNA
gaaagtggagttcgaacataatccaggg

SEQ ID NO: 1596 - DNA, 28 bp, synthetic construct
  source 1..28: mol_type = other DNA
cagatgcaggagtggtctatagccctgg

SEQ ID NO: 1597 - DNA, 28 bp, synthetic construct
  source 1..28: mol_type = other DNA
aggtaatagcagtcagatgcaggagtgg

SEQ ID NO: 1598 - DNA, 28 bp, synthetic construct
  source 1..28: mol_type = other DNA
tgacaaggtaatagcagtcagatgcagg

SEQ ID NO: 1599 - DNA, 28 bp, synthetic construct
  source 1..28: mol_type = other DNA
actgctattaccttgtcacaaatcctgg

SEQ ID NO: 1600 - DNA, 28 bp, synthetic construct
  source 1..28: mol_type = other DNA
ctattaccttgtcacaaatcctggcagg

SEQ ID NO: 1601 - DNA, 28 bp, synthetic construct
  source 1..28: mol_type = other DNA
atcttgcctgccaggatttgtgacaagg

SEQ ID NO: 1602 - DNA, 28 bp, synthetic construct
  source 1..28: mol_type = other DNA
taactgctttgtcatcttgcctgccagg

SEQ ID NO: 1603 - DNA, 28 bp, synthetic construct
  source 1..28: mol_type = other DNA
ggcaagatgacaaagcagttacatcagg

SEQ ID NO: 1604 - DNA, 28 bp, synthetic construct
  source 1..28: mol_type = other DNA
gacaaagcagttacatcaggacagttgg

SEQ ID NO: 1605 - DNA, 28 bp, synthetic construct
  source 1..28: mol_type = other DNA
gcagttacatcaggacagttggcagtgg

SEQ ID NO: 1606 - DNA, 28 bp, synthetic construct
  source 1..28: mol_type = other DNA
ttacatcaggacagttggcagtggcagg

SEQ ID NO: 1607 - DNA, 28 bp, synthetic construct
  source 1..28: mol_type = other DNA
cagttggcagtggcaggtatgaacgtgg

SEQ ID NO: 1608 - DNA, 28 bp, synthetic construct
  source 1..28: mol_type = other DNA
gtggcaggtatgaacgtggcccctcagg

SEQ ID NO: 1609 - DNA, 28 bp, synthetic construct
  source 1..28: mol_type = other DNA
agtaaagaggagtgacaagcctgagggg

SEQ ID NO: 1610 - DNA, 28 bp, synthetic construct
  source 1..28: mol_type = other DNA
cagtaaagaggagtgacaagcctgaggg

SEQ ID NO: 1611 - DNA, 28 bp, synthetic construct
  source 1..28: mol_type = other DNA
gcagtaaagaggagtgacaagcctgagg

SEQ ID NO: 1612 - DNA, 28 bp, synthetic construct
  source 1..28: mol_type = other DNA
gtcatgaactgggagtgcagtaaagagg

SEQ ID NO: 1613 - DNA, 28 bp, synthetic construct
  source 1..28: mol_type = other DNA
gtcttgctgtctggtgtcatgaactggg

SEQ ID NO: 1614 - DNA, 28 bp, synthetic construct
  source 1..28: mol_type = other DNA
tgtcttgctgtctggtgtcatgaactgg

SEQ ID NO: 1615 - DNA, 28 bp, synthetic construct
  source 1..28: mol_type = other DNA
ccagacagcaagacatgagccagatagg

SEQ ID NO: 1616 - DNA, 28 bp, synthetic construct
  source 1..28: mol_type = other DNA
cagacagcaagacatgagccagataggg

SEQ ID NO: 1617 - DNA, 28 bp, synthetic construct
  source 1..28: mol_type = other DNA
agacagcaagacatgagccagatagggg

SEQ ID NO: 1618 - DNA, 28 bp, synthetic construct
  source 1..28: mol_type = other DNA
caagacatgagccagataggggcagtgg

SEQ ID NO: 1619 - DNA, 28 bp, synthetic construct
  source 1..28: mol_type = other DNA
gccagataggggcagtggaagctgcagg

SEQ ID NO: 1620 - DNA, 28 bp, synthetic construct
  source 1..28: mol_type = other DNA
tcctgcagcttccactgcccctatctgg

SEQ ID NO: 1621 - DNA, 28 bp, synthetic construct
  source 1..28: mol_type = other DNA
agataggggcagtggaagctgcaggagg

SEQ ID NO: 1622 - DNA, 28 bp, synthetic construct
  source 1..28: mol_type = other DNA
ggaagctgcaggaggattgaagtcatgg

SEQ ID NO: 1623 - DNA, 28 bp, synthetic construct
  source 1..28: mol_type = other DNA
ttgaagtcatggagccagagatgagagg

SEQ ID NO: 1624 - DNA, 28 bp, synthetic construct
  source 1..28: mol_type = other DNA
catggagccagagatgagaggaaacagg

SEQ ID NO: 1625 - DNA, 28 bp, synthetic construct
  source 1..28: mol_type = other DNA
gagttggcctgtttcctctcatctctgg

SEQ ID NO: 1626 - DNA, 28 bp, synthetic construct
  source 1..28: mol_type = other DNA
ggaaacaggccaactctgtttacaaagg

SEQ ID NO: 1627 - DNA, 28 bp, synthetic construct
  source 1..28: mol_type = other DNA
gctggtgctcctttgtaaacagagttgg

SEQ ID NO: 1628 - DNA, 28 bp, synthetic construct
  source 1..28: mol_type = other DNA
actctgtttacaaaggagcaccagcagg

SEQ ID NO: 1629 - DNA, 28 bp, synthetic construct
  source 1..28: mol_type = other DNA
ttacaaaggagcaccagcaggagagtgg

SEQ ID NO: 1630 - DNA, 28 bp, synthetic construct
  source 1..28: mol_type = other DNA
ggagcaccagcaggagagtggtgtgagg

SEQ ID NO: 1631 - DNA, 28 bp, synthetic construct
  source 1..28: mol_type = other DNA
gttaatcctcacaccactctcctgctgg

SEQ ID NO: 1632 - DNA, 28 bp, synthetic construct
  source 1..28: mol_type = other DNA
tggtgtgaggattaacattccatgcagg

SEQ ID NO: 1633 - DNA, 28 bp, synthetic construct
  source 1..28: mol_type = other DNA
ggtgtgaggattaacattccatgcaggg

SEQ ID NO: 1634 - DNA, 28 bp, synthetic construct
  source 1..28: mol_type = other DNA
gatcatgtatctgaaagaccctgcatgg

SEQ ID NO: 1635 - DNA, 28 bp, synthetic construct
  source 1..28: mol_type = other DNA
tcttctgccagctcaactgaaacccagg

SEQ ID NO: 1636 - DNA, 28 bp, synthetic construct
  source 1..28: mol_type = other DNA
tctgccagctcaactgaaacccaggagg

SEQ ID NO: 1637 - DNA, 28 bp, synthetic construct
  source 1..28: mol_type = other DNA
gaaacctcctgggtttcagttgagctgg

SEQ ID NO: 1638 - DNA, 28 bp, synthetic construct
  source 1..28: mol_type = other DNA
aactgaaacccaggaggtttcctgaagg

SEQ ID NO: 1639 - DNA, 28 bp, synthetic construct
  source 1..28: mol_type = other DNA
tggtttcaccttcaggaaacctcctggg

SEQ ID NO: 1640 - DNA, 28 bp, synthetic construct
  source 1..28: mol_type = other DNA
ttggtttcaccttcaggaaacctcctgg

SEQ ID NO: 1641 - DNA, 28 bp, synthetic construct
  source 1..28: mol_type = other DNA
gtagaagggtcttggtttcaccttcagg

SEQ ID NO: 1642 - DNA, 28 bp, synthetic construct
  source 1..28: mol_type = other DNA
tgcggcttcagaggtagaagggtcttgg

SEQ ID NO: 1643 - DNA, 28 bp, synthetic construct
  source 1..28: mol_type = other DNA
acagaatgcggcttcagaggtagaaggg

SEQ ID NO: 1644 - DNA, 28 bp, synthetic construct
  source 1..28: mol_type = other DNA
gacagaatgcggcttcagaggtagaagg

SEQ ID NO: 1645 - DNA, 28 bp, synthetic construct
  source 1..28: mol_type = other DNA
tacctctgaagccgcattctgtctaagg

SEQ ID NO: 1646 - DNA, 28 bp, synthetic construct
  source 1..28: mol_type = other DNA
gaccttagacagaatgcggcttcagagg

SEQ ID NO: 1647 - DNA, 28 bp, synthetic construct
  source 1..28: mol_type = other DNA
ccgcattctgtctaaggtccgtgtttgg

SEQ ID NO: 1648 - DNA, 28 bp, synthetic construct
  source 1..28: mol_type = other DNA
aaggtccgtgtttggctgttttgagagg

SEQ ID NO: 1649 - DNA, 28 bp, synthetic construct
  source 1..28: mol_type = other DNA
tccgtgtttggctgttttgagaggctgg

SEQ ID NO: 1650 - DNA, 28 bp, synthetic construct
  source 1..28: mol_type = other DNA
ccgtgtttggctgttttgagaggctggg

SEQ ID NO: 1651 - DNA, 28 bp, synthetic construct
  source 1..28: mol_type = other DNA
tggctgttttgagaggctgggagacagg

SEQ ID NO: 1652 - DNA, 28 bp, synthetic construct
  source 1..28: mol_type = other DNA
gacaccaaaagagtacctgtctcacagg

SEQ ID NO: 1653 - DNA, 28 bp, synthetic construct
  source 1..28: mol_type = other DNA
agatcctgtgagacaggtactcttttgg

SEQ ID NO: 1654 - DNA, 28 bp, synthetic construct
  source 1..28: mol_type = other DNA
cctgtctcacaggatctttcctgagagg

SEQ ID NO: 1655 - DNA, 28 bp, synthetic construct
  source 1..28: mol_type = other DNA
ctcacaggatctttcctgagaggaatgg

SEQ ID NO: 1656 - DNA, 28 bp, synthetic construct
  source 1..28: mol_type = other DNA
cctgagaggaatggtctagtaagactgg

SEQ ID NO: 1657 - DNA, 28 bp, synthetic construct
  source 1..28: mol_type = other DNA
aatggtctagtaagactggtcattatgg

SEQ ID NO: 1658 - DNA, 28 bp, synthetic construct
  source 1..28: mol_type = other DNA
atggtctagtaagactggtcattatggg

SEQ ID NO: 1659 - DNA, 28 bp, synthetic construct
  source 1..28: mol_type = other DNA
tagtaagactggtcattatgggctttgg

SEQ ID NO: 1660 - DNA, 28 bp, synthetic construct
  source 1..28: mol_type = other DNA
gtcattatgggctttggagtaacacagg

SEQ ID NO: 1661 - DNA, 28 bp, synthetic construct
  source 1..28: mol_type = other DNA
tggagtaacacaggcttaatgccactgg

SEQ ID NO: 1662 - DNA, 28 bp, synthetic construct
  source 1..28: mol_type = other DNA
atgccactggcgactctgccccttttgg

SEQ ID NO: 1663 - DNA, 28 bp, synthetic construct
  source 1..28: mol_type = other DNA
caaccaaaaggggcagagtcgccagtgg

SEQ ID NO: 1664 - DNA, 28 bp, synthetic construct
  source 1..28: mol_type = other DNA
ctggcgactctgccccttttggttgtgg

SEQ ID NO: 1665 - DNA, 28 bp, synthetic construct
  source 1..28: mol_type = other DNA
ctctgccccttttggttgtggaaactgg

SEQ ID NO: 1666 - DNA, 28 bp, synthetic construct
  source 1..28: mol_type = other DNA
tctgccccttttggttgtggaaactggg

SEQ ID NO: 1667 - DNA, 28 bp, synthetic construct
  source 1..28: mol_type = other DNA
tttgcccagtttccacaaccaaaagggg

SEQ ID NO: 1668 - DNA, 28 bp, synthetic construct
  source 1..28: mol_type = other DNA
atttgcccagtttccacaaccaaaaggg

SEQ ID NO: 1669 - DNA, 28 bp, synthetic construct
  source 1..28: mol_type = other DNA
catttgcccagtttccacaaccaaaagg

SEQ ID NO: 1670 - DNA, 28 bp, synthetic construct
  source 1..28: mol_type = other DNA
ttttatatgaaggttaagaagcttgagg

SEQ ID NO: 1671 - DNA, 28 bp, synthetic construct
  source 1..28: mol_type = other DNA
atgcttatatatgctttttatatgaagg

SEQ ID NO: 1672 - DNA, 28 bp, synthetic construct
  source 1..28: mol_type = other DNA
tagaccctgtcatttctgctagccctgg

SEQ ID NO: 1673 - DNA, 28 bp, synthetic construct
  source 1..28: mol_type = other DNA
gagtccagggctagcagaaatgacaggg

SEQ ID NO: 1674 - DNA, 28 bp, synthetic construct
  source 1..28: mol_type = other DNA
ggagtccagggctagcagaaatgacagg

SEQ ID NO: 1675 - DNA, 28 bp, synthetic construct
  source 1..28: mol_type = other DNA
tttctgctagccctggactccagcaagg

SEQ ID NO: 1676 - DNA, 28 bp, synthetic construct
  source 1..28: mol_type = other DNA
tgtaaatggaccttgctggagtccaggg

SEQ ID NO: 1677 - DNA, 28 bp, synthetic construct
  source 1..28: mol_type = other DNA
ttgtaaatggaccttgctggagtccagg

SEQ ID NO: 1678 - DNA, 28 bp, synthetic construct
  source 1..28: mol_type = other DNA
ggactccagcaaggtccatttacaatgg

SEQ ID NO: 1679 - DNA, 28 bp, synthetic construct
  source 1..28: mol_type = other DNA
gctatccattgtaaatggaccttgctgg

SEQ ID NO: 1680 - DNA, 28 bp, synthetic construct
  source 1..28: mol_type = other DNA
tggatagtcagctatccattgtaaatgg

SEQ ID NO: 1681 - DNA, 28 bp, synthetic construct
  source 1..28: mol_type = other DNA
aaatgtgctatcaacattcaaacaatgg

SEQ ID NO: 1682 - DNA, 28 bp, synthetic construct
  source 1..28: mol_type = other DNA
atagcacatttgtgaacaagaagagagg

SEQ ID NO: 1683 - DNA, 28 bp, synthetic construct
  source 1..28: mol_type = other DNA
acaagaagagaggacaaataacaagagg

SEQ ID NO: 1684 - DNA, 28 bp, synthetic construct
  source 1..28: mol_type = other DNA
aagagaggacaaataacaagaggtttgg

SEQ ID NO: 1685 - DNA, 28 bp, synthetic construct
  source 1..28: mol_type = other DNA
ggacaaataacaagaggtttggaactgg

SEQ ID NO: 1686 - DNA, 28 bp, synthetic construct
  source 1..28: mol_type = other DNA
tggaactggaagaaattccagccatcgg

SEQ ID NO: 1687 - DNA, 28 bp, synthetic construct
  source 1..28: mol_type = other DNA
ttccagccatcggttttaaaagacgagg

SEQ ID NO: 1688 - DNA, 28 bp, synthetic construct
  source 1..28: mol_type = other DNA
gtcctcgtcttttaaaaccgatggctgg

SEQ ID NO: 1689 - DNA, 28 bp, synthetic construct
  source 1..28: mol_type = other DNA
actggtcctcgtcttttaaaaccgatgg

SEQ ID NO: 1690 - DNA, 28 bp, synthetic construct
  source 1..28: mol_type = other DNA
aaaagacgaggaccagtcttcagagagg

SEQ ID NO: 1691 - DNA, 28 bp, synthetic construct
  source 1..28: mol_type = other DNA
tgtcactagtggcctctctgaagactgg

SEQ ID NO: 1692 - DNA, 28 bp, synthetic construct
  source 1..28: mol_type = other DNA
gaagtttggagcagagtgtcactagtgg

SEQ ID NO: 1693 - DNA, 28 bp, synthetic construct
  source 1..28: mol_type = other DNA
ggcacttttttggcaaaaagaagtttgg

SEQ ID NO: 1694 - DNA, 28 bp, synthetic construct
  source 1..28: mol_type = other DNA
ggctggatggagggtggcacttttttgg

SEQ ID NO: 1695 - DNA, 28 bp, synthetic construct
  source 1..28: mol_type = other DNA
atgggggtgggggctggatggagggtgg

SEQ ID NO: 1696 - DNA, 28 bp, synthetic construct
  source 1..28: mol_type = other DNA
gagatgggggtgggggctggatggaggg

SEQ ID NO: 1697 - DNA, 28 bp, synthetic construct
  source 1..28: mol_type = other DNA
agagatgggggtgggggctggatggagg

SEQ ID NO: 1698 - DNA, 28 bp, synthetic construct
  source 1..28: mol_type = other DNA
tgcagagatgggggtgggggctggatgg

SEQ ID NO: 1699 - DNA, 28 bp, synthetic construct
  source 1..28: mol_type = other DNA
gacttgcagagatgggggtgggggctgg

SEQ ID NO: 1700 - DNA, 28 bp, synthetic construct
  source 1..28: mol_type = other DNA
taaggacttgcagagatgggggtggggg

SEQ ID NO: 1701 - DNA, 28 bp, synthetic construct
  source 1..28: mol_type = other DNA
gtaaggacttgcagagatgggggtgggg

SEQ ID NO: 1702 - DNA, 28 bp, synthetic construct
  source 1..28: mol_type = other DNA
agtaaggacttgcagagatgggggtggg

SEQ ID NO: 1703 - DNA, 28 bp, synthetic construct
  source 1..28: mol_type = other DNA
cagtaaggacttgcagagatgggggtgg

SEQ ID NO: 1704 - DNA, 28 bp, synthetic construct
  source 1..28: mol_type = other DNA
cacccccatctctgcaagtccttactgg

SEQ ID NO: 1705 - DNA, 28 bp, synthetic construct
  source 1..28: mol_type = other DNA
cgccagtaaggacttgcagagatggggg

SEQ ID NO: 1706 - DNA, 28 bp, synthetic construct
  source 1..28: mol_type = other DNA
tcgccagtaaggacttgcagagatgggg

SEQ ID NO: 1707 - DNA, 28 bp, synthetic construct
  source 1..28: mol_type = other DNA
ctcgccagtaaggacttgcagagatggg

SEQ ID NO: 1708 - DNA, 28 bp, synthetic construct
  source 1..28: mol_type = other DNA
tctcgccagtaaggacttgcagagatgg

SEQ ID NO: 1709 - DNA, 28 bp, synthetic construct
  source 1..28: mol_type = other DNA
atctctgcaagtccttactggcgagagg

SEQ ID NO: 1710 - DNA, 28 bp, synthetic construct
  source 1..28: mol_type = other DNA
tctgcaagtccttactggcgagaggagg

SEQ ID NO: 1711 - DNA, 28 bp, synthetic construct
  source 1..28: mol_type = other DNA
gaaaagtatcctcctctcgccagtaagg

SEQ ID NO: 1712 - DNA, 28 bp, synthetic construct
  source 1..28: mol_type = other DNA
tttctaattaaaaacctgtgatatatgg

SEQ ID NO: 1713 - DNA, 28 bp, synthetic construct
  source 1..28: mol_type = other DNA
gaatacttgtcaggccatatatcacagg

SEQ ID NO: 1714 - DNA, 28 bp, synthetic construct
  source 1..28: mol_type = other DNA
ttaattacatttaagaatacttgtcagg

SEQ ID NO: 1715 - DNA, 28 bp, synthetic construct
  source 1..28: mol_type = other DNA
tgacaagtattcttaaatgtaattaagg

SEQ ID NO: 1716 - DNA, 28 bp, synthetic construct
  source 1..28: mol_type = other DNA
gacaagtattcttaaatgtaattaaggg

SEQ ID NO: 1717 - DNA, 28 bp, synthetic construct
  source 1..28: mol_type = other DNA
acaagtattcttaaatgtaattaagggg

SEQ ID NO: 1718 - DNA, 28 bp, synthetic construct
  source 1..28: mol_type = other DNA
gaccatagtacagaatatttccatccgg

SEQ ID NO: 1719 - DNA, 28 bp, synthetic construct
  source 1..28: mol_type = other DNA
aaccggatggaaatattctgtactatgg

SEQ ID NO: 1720 - DNA, 28 bp, synthetic construct
  source 1..28: mol_type = other DNA
ctagattggctaaactagaaccggatgg

SEQ ID NO: 1721 - DNA, 28 bp, synthetic construct
  source 1..28: mol_type = other DNA
tttactagattggctaaactagaaccgg

SEQ ID NO: 1722 - DNA, 28 bp, synthetic construct
  source 1..28: mol_type = other DNA
ttagccaatctagtaaatgatccaaagg

SEQ ID NO: 1723 - DNA, 28 bp, synthetic construct
  source 1..28: mol_type = other DNA
tagccaatctagtaaatgatccaaaggg

SEQ ID NO: 1724 - DNA, 28 bp, synthetic construct
  source 1..28: mol_type = other DNA
ggaccctttggatcatttactagattgg

SEQ ID NO: 1725 - DNA, 28 bp, synthetic construct
  source 1..28: mol_type = other DNA
atgatccaaagggtcccgtgcttagagg

SEQ ID NO: 1726 - DNA, 28 bp, synthetic construct
  source 1..28: mol_type = other DNA
tgatccaaagggtcccgtgcttagaggg

SEQ ID NO: 1727 - DNA, 28 bp, synthetic construct
  source 1..28: mol_type = other DNA
actgccctctaagcacgggaccctttgg

SEQ ID NO: 1728 - DNA, 28 bp, synthetic construct
  source 1..28: mol_type = other DNA
tactgtcttactgccctctaagcacggg

SEQ ID NO: 1729 - DNA, 28 bp, synthetic construct
  source 1..28: mol_type = other DNA
ttactgtcttactgccctctaagcacgg

SEQ ID NO: 1730 - DNA, 28 bp, synthetic construct
  source 1..28: mol_type = other DNA
aggtgctgtgcagggaggagtcttaggg

SEQ ID NO: 1731 - DNA, 28 bp, synthetic construct
  source 1..28: mol_type = other DNA
caggtgctgtgcagggaggagtcttagg

SEQ ID NO: 1732 - DNA, 28 bp, synthetic construct
  source 1..28: mol_type = other DNA
gtgggggtgcaggtgctgtgcagggagg

SEQ ID NO: 1733 - DNA, 28 bp, synthetic construct
  source 1..28: mol_type = other DNA
gcagtgggggtgcaggtgctgtgcaggg

SEQ ID NO: 1734 - DNA, 28 bp, synthetic construct
  source 1..28: mol_type = other DNA
ggcagtgggggtgcaggtgctgtgcagg

SEQ ID NO: 1735 - DNA, 28 bp, synthetic construct
  source 1..28: mol_type = other DNA
cacagcacctgcacccccactgcccagg

SEQ ID NO: 1736 - DNA, 28 bp, synthetic construct
  source 1..28: mol_type = other DNA
acagcacctgcacccccactgcccaggg

SEQ ID NO: 1737 - DNA, 28 bp, synthetic construct
  source 1..28: mol_type = other DNA
cagcacctgcacccccactgcccagggg

SEQ ID NO: 1738 - DNA, 28 bp, synthetic construct
  source 1..28: mol_type = other DNA
agcacctgcacccccactgcccaggggg

SEQ ID NO: 1739 - DNA, 28 bp, synthetic construct
  source 1..28: mol_type = other DNA
gcagccccctgggcagtgggggtgcagg

SEQ ID NO: 1740 - DNA, 28 bp, synthetic construct
  source 1..28: mol_type = other DNA
atggatgcagccccctgggcagtggggg

SEQ ID NO: 1741 - DNA, 28 bp, synthetic construct
  source 1..28: mol_type = other DNA
gatggatgcagccccctgggcagtgggg

SEQ ID NO: 1742 - DNA, 28 bp, synthetic construct
  source 1..28: mol_type = other DNA
agatggatgcagccccctgggcagtggg

SEQ ID NO: 1743 - DNA, 28 bp, synthetic construct
  source 1..28: mol_type = other DNA
gagatggatgcagccccctgggcagtgg

SEQ ID NO: 1744 - DNA, 28 bp, synthetic construct
  source 1..28: mol_type = other DNA
catgtggagatggatgcagccccctggg

SEQ ID NO: 1745 - DNA, 28 bp, synthetic construct
  source 1..28: mol_type = other DNA
tcatgtggagatggatgcagccccctgg

SEQ ID NO: 1746 - DNA, 28 bp, synthetic construct
  source 1..28: mol_type = other DNA
acagggagggtgagtcatgtggagatgg

SEQ ID NO: 1747 - DNA, 28 bp, synthetic construct
  source 1..28: mol_type = other DNA
cgttgcacagggagggtgagtcatgtgg

SEQ ID NO: 1748 - DNA, 28 bp, synthetic construct
  source 1..28: mol_type = other DNA
tgactcaccctccctgtgcaacgcatgg

SEQ ID NO: 1749 - DNA, 28 bp, synthetic construct
  source 1..28: mol_type = other DNA
gactcaccctccctgtgcaacgcatggg

SEQ ID NO: 1750 - DNA, 28 bp, synthetic construct
  source 1..28: mol_type = other DNA
actcaccctccctgtgcaacgcatgggg

SEQ ID NO: 1751 - DNA, 28 bp, synthetic construct
  source 1..28: mol_type = other DNA
ctcaccctccctgtgcaacgcatggggg

SEQ ID NO: 1752 - DNA, 28 bp, synthetic construct
  source 1..28: mol_type = other DNA
ccctccctgtgcaacgcatgggggtagg

SEQ ID NO: 1753 - DNA, 28 bp, synthetic construct
  source 1..28: mol_type = other DNA
cctccctgtgcaacgcatgggggtaggg

SEQ ID NO: 1754 - DNA, 28 bp, synthetic construct
  source 1..28: mol_type = other DNA
ccctgtgcaacgcatgggggtagggagg

SEQ ID NO: 1755 - DNA, 28 bp, synthetic construct
  source 1..28: mol_type = other DNA
cctgtgcaacgcatgggggtagggaggg

SEQ ID NO: 1756 - DNA, 28 bp, synthetic construct
  source 1..28: mol_type = other DNA
ccagtattatcagccatcagcaccctgg

SEQ ID NO: 1757 - DNA, 28 bp, synthetic construct
  source 1..28: mol_type = other DNA
cagtattatcagccatcagcaccctggg

SEQ ID NO: 1758 - DNA, 28 bp, synthetic construct
  source 1..28: mol_type = other DNA
agtattatcagccatcagcaccctgggg

SEQ ID NO: 1759 - DNA, 28 bp, synthetic construct
  source 1..28: mol_type = other DNA
taatcagttcaccccagggtgctgatgg

SEQ ID NO: 1760 - DNA, 28 bp, synthetic construct
  source 1..28: mol_type = other DNA
agcaccctggggtgaactgattatcagg

SEQ ID NO: 1761 - DNA, 28 bp, synthetic construct
  source 1..28: mol_type = other DNA
ttgtcctgataatcagttcaccccaggg

SEQ ID NO: 1762 - DNA, 28 bp, synthetic construct
  source 1..28: mol_type = other DNA
gttgtcctgataatcagttcaccccagg

SEQ ID NO: 1763 - DNA, 28 bp, synthetic construct
  source 1..28: mol_type = other DNA
actaaaaacacacctaataaagccttgg

SEQ ID NO: 1764 - DNA, 28 bp, synthetic construct
  source 1..28: mol_type = other DNA
cacctaataaagccttggagacacatgg

SEQ ID NO: 1765 - DNA, 28 bp, synthetic construct
  source 1..28: mol_type = other DNA
tgccatgtgtctccaaggctttattagg

SEQ ID NO: 1766 - DNA, 28 bp, synthetic construct
  source 1..28: mol_type = other DNA
tcacggtgcttgccatgtgtctccaagg

SEQ ID NO: 1767 - DNA, 28 bp, synthetic construct
  source 1..28: mol_type = other DNA
tggagacacatggcaagcaccgtgatgg

SEQ ID NO: 1768 - DNA, 28 bp, synthetic construct
  source 1..28: mol_type = other DNA
cttagaaatcgcttctagtccatcacgg

SEQ ID NO: 1769 - DNA, 28 bp, synthetic construct
  source 1..28: mol_type = other DNA
atgctgctttgaatgcaatgtcagctgg

SEQ ID NO: 1770 - DNA, 28 bp, synthetic construct
  source 1..28: mol_type = other DNA
ttgaatgcaatgtcagctggatgcttgg

SEQ ID NO: 1771 - DNA, 28 bp, synthetic construct
  source 1..28: mol_type = other DNA
gatgcttggtgagcagaaatagacaagg

SEQ ID NO: 1772 - DNA, 28 bp, synthetic construct
  source 1..28: mol_type = other DNA
atgcttggtgagcagaaatagacaaggg

SEQ ID NO: 1773 - DNA, 28 bp, synthetic construct
  source 1..28: mol_type = other DNA
tgcttggtgagcagaaatagacaagggg

SEQ ID NO: 1774 - DNA, 28 bp, synthetic construct
  source 1..28: mol_type = other DNA
gtgagcagaaatagacaaggggaaatgg

SEQ ID NO: 1775 - DNA, 28 bp, synthetic construct
  source 1..28: mol_type = other DNA
tagacaaggggaaatggagcaagcgcgg

SEQ ID NO: 1776 - DNA, 28 bp, synthetic construct
  source 1..28: mol_type = other DNA
aggggaaatggagcaagcgcggcatagg

SEQ ID NO: 1777 - DNA, 28 bp, synthetic construct
  source 1..28: mol_type = other DNA
ggggaaatggagcaagcgcggcataggg

SEQ ID NO: 1778 - DNA, 28 bp, synthetic construct
  source 1..28: mol_type = other DNA
gggaaatggagcaagcgcggcatagggg

SEQ ID NO: 1779 - DNA, 28 bp, synthetic construct
  source 1..28: mol_type = other DNA
tctgattcctaagtttacctaagactgg

SEQ ID NO: 1780 - DNA, 28 bp, synthetic construct
  source 1..28: mol_type = other DNA
ctgattcctaagtttacctaagactggg

SEQ ID NO: 1781 - DNA, 28 bp, synthetic construct
  source 1..28: mol_type = other DNA
tgattcctaagtttacctaagactgggg

SEQ ID NO: 1782 - DNA, 28 bp, synthetic construct
  source 1..28: mol_type = other DNA
cgtggccccagtcttaggtaaacttagg

SEQ ID NO: 1783 - DNA, 28 bp, synthetic construct
  source 1..28: mol_type = other DNA
ctaagtttacctaagactggggccacgg

SEQ ID NO: 1784 - DNA, 28 bp, synthetic construct
  source 1..28: mol_type = other DNA
taagtttacctaagactggggccacggg

SEQ ID NO: 1785 - DNA, 28 bp, synthetic construct
  source 1..28: mol_type = other DNA
aagtttacctaagactggggccacgggg

SEQ ID NO: 1786 - DNA, 28 bp, synthetic construct
  source 1..28: mol_type = other DNA
ttacctaagactggggccacggggtcgg

SEQ ID NO: 1787 - DNA, 28 bp, synthetic construct
  source 1..28: mol_type = other DNA
tacctaagactggggccacggggtcggg

SEQ ID NO: 1788 - DNA, 28 bp, synthetic construct
  source 1..28: mol_type = other DNA
cacccgaccccgtggccccagtcttagg

SEQ ID NO: 1789 - DNA, 28 bp, synthetic construct
  source 1..28: mol_type = other DNA
tggggccacggggtcgggtgtcccctgg

SEQ ID NO: 1790 - DNA, 28 bp, synthetic construct
  source 1..28: mol_type = other DNA
ggggccacggggtcgggtgtcccctggg

SEQ ID NO: 1791 - DNA, 28 bp, synthetic construct
  source 1..28: mol_type = other DNA
aggtcccaggggacacccgaccccgtgg

SEQ ID NO: 1792 - DNA, 28 bp, synthetic construct
  source 1..28: mol_type = other DNA
aggctgcatgagacgtaggtcccagggg

SEQ ID NO: 1793 - DNA, 28 bp, synthetic construct
  source 1..28: mol_type = other DNA
caggctgcatgagacgtaggtcccaggg

SEQ ID NO: 1794 - DNA, 28 bp, synthetic construct
  source 1..28: mol_type = other DNA
cctgggacctacgtctcatgcagcctgg

SEQ ID NO: 1795 - DNA, 28 bp, synthetic construct
  source 1..28: mol_type = other DNA
ctgggacctacgtctcatgcagcctggg

SEQ ID NO: 1796 - DNA, 28 bp, synthetic construct
  source 1..28: mol_type = other DNA
tgggacctacgtctcatgcagcctgggg

SEQ ID NO: 1797 - DNA, 28 bp, synthetic construct
  source 1..28: mol_type = other DNA
ctggaccccaggctgcatgagacgtagg

SEQ ID NO: 1798 - DNA, 28 bp, synthetic construct
  source 1..28: mol_type = other DNA
tctcatgcagcctggggtccagagctgg

SEQ ID NO: 1799 - DNA, 28 bp, synthetic construct
  source 1..28: mol_type = other DNA
atgcagcctggggtccagagctggcagg

SEQ ID NO: 1800 - DNA, 28 bp, synthetic construct
  source 1..28: mol_type = other DNA
attgttcctgccagctctggaccccagg

SEQ ID NO: 1801 - DNA, 28 bp, synthetic construct
  source 1..28: mol_type = other DNA
tggggtccagagctggcaggaacaatgg

SEQ ID NO: 1802 - DNA, 28 bp, synthetic construct
  source 1..28: mol_type = other DNA
ccagagctggcaggaacaatggagatgg

SEQ ID NO: 1803 - DNA, 28 bp, synthetic construct
  source 1..28: mol_type = other DNA
cagagctggcaggaacaatggagatggg

SEQ ID NO: 1804 - DNA, 28 bp, synthetic construct
  source 1..28: mol_type = other DNA
agagctggcaggaacaatggagatgggg

SEQ ID NO: 1805 - DNA, 28 bp, synthetic construct
  source 1..28: mol_type = other DNA
caggaacaatggagatggggaccaaagg

SEQ ID NO: 1806 - DNA, 28 bp, synthetic construct
  source 1..28: mol_type = other DNA
gagaaaaagcagcggtgacagcctttgg

SEQ ID NO: 1807 - DNA, 28 bp, synthetic construct
  source 1..28: mol_type = other DNA
gggcgggcatttcgagaaaaagcagcgg

SEQ ID NO: 1808 - DNA, 28 bp, synthetic construct
  source 1..28: mol_type = other DNA
gctgctttttctcgaaatgcccgcccgg

SEQ ID NO: 1809 - DNA, 28 bp, synthetic construct
  source 1..28: mol_type = other DNA
ctgctttttctcgaaatgcccgcccggg

SEQ ID NO: 1810 - DNA, 28 bp, synthetic construct
  source 1..28: mol_type = other DNA
tcgaaatgcccgcccgggtcctgtctgg

SEQ ID NO: 1811 - DNA, 28 bp, synthetic construct
  source 1..28: mol_type = other DNA
cgaaatgcccgcccgggtcctgtctggg

SEQ ID NO: 1812 - DNA, 28 bp, synthetic construct
  source 1..28: mol_type = other DNA
gaaatgcccgcccgggtcctgtctgggg

SEQ ID NO: 1813 - DNA, 28 bp, synthetic construct
  source 1..28: mol_type = other DNA
cgggagccccagacaggacccgggcggg

SEQ ID NO: 1814 - DNA, 28 bp, synthetic construct
  source 1..28: mol_type = other DNA
gcgggagccccagacaggacccgggcgg

SEQ ID NO: 1815 - DNA, 28 bp, synthetic construct
  source 1..28: mol_type = other DNA
taggcgggagccccagacaggacccggg

SEQ ID NO: 1816 - DNA, 28 bp, synthetic construct
  source 1..28: mol_type = other DNA
gtaggcgggagccccagacaggacccgg

SEQ ID NO: 1817 - DNA, 28 bp, synthetic construct
  source 1..28: mol_type = other DNA
gagcgcgtaggcgggagccccagacagg

SEQ ID NO: 1818 - DNA, 28 bp, synthetic construct
  source 1..28: mol_type = other DNA
ctgtgcacgtgatgagcgcgtaggcggg

SEQ ID NO: 1819 - DNA, 28 bp, synthetic construct
  source 1..28: mol_type = other DNA
gctgtgcacgtgatgagcgcgtaggcgg

SEQ ID NO: 1820 - DNA, 28 bp, synthetic construct
  source 1..28: mol_type = other DNA
tgggctgtgcacgtgatgagcgcgtagg

SEQ ID NO: 1821 - DNA, 28 bp, synthetic construct
  source 1..28: mol_type = other DNA
gtgcacagcccaaacttttcagagccgg

SEQ ID NO: 1822 - DNA, 28 bp, synthetic construct
  source 1..28: mol_type = other DNA
gcccaaacttttcagagccggcccgagg

SEQ ID NO: 1823 - DNA, 28 bp, synthetic construct
  source 1..28: mol_type = other DNA
gcctcgggccggctctgaaaagtttggg

SEQ ID NO: 1824 - DNA, 28 bp, synthetic construct
  source 1..28: mol_type = other DNA
ggcctcgggccggctctgaaaagtttgg

SEQ ID NO: 1825 - DNA, 28 bp, synthetic construct
  source 1..28: mol_type = other DNA
cttttcagagccggcccgaggcctgcgg

SEQ ID NO: 1826 - DNA, 28 bp, synthetic construct
  source 1..28: mol_type = other DNA
ttttcagagccggcccgaggcctgcggg

SEQ ID NO: 1827 - DNA, 28 bp, synthetic construct
  source 1..28: mol_type = other DNA
agagccggcccgaggcctgcgggcccgg

SEQ ID NO: 1828 - DNA, 28 bp, synthetic construct
  source 1..28: mol_type = other DNA
gagccggcccgaggcctgcgggcccggg

SEQ ID NO: 1829 - DNA, 28 bp, synthetic construct
  source 1..28: mol_type = other DNA
gcgcccgggcccgcaggcctcgggccgg

SEQ ID NO: 1830 - DNA, 28 bp, synthetic construct
  source 1..28: mol_type = other DNA
cccgaggcctgcgggcccgggcgccagg

SEQ ID NO: 1831 - DNA, 28 bp, synthetic construct
  source 1..28: mol_type = other DNA
ccgaggcctgcgggcccgggcgccaggg

SEQ ID NO: 1832 - DNA, 28 bp, synthetic construct
  source 1..28: mol_type = other DNA
aggcctgcgggcccgggcgccagggtgg

SEQ ID NO: 1833 - DNA, 28 bp, synthetic construct
  source 1..28: mol_type = other DNA
aaaccaccctggcgcccgggcccgcagg

SEQ ID NO: 1834 - DNA, 28 bp, synthetic construct
  source 1..28: mol_type = other DNA
gggcccgggcgccagggtggtttttagg

SEQ ID NO: 1835 - DNA, 28 bp, synthetic construct
  source 1..28: mol_type = other DNA
ggcccgggcgccagggtggtttttaggg

SEQ ID NO: 1836 - DNA, 28 bp, synthetic construct
  source 1..28: mol_type = other DNA
aaccctaaaaaccaccctggcgcccggg

SEQ ID NO: 1837 - DNA, 28 bp, synthetic construct
  source 1..28: mol_type = other DNA
aaaccctaaaaaccaccctggcgcccgg

SEQ ID NO: 1838 - DNA, 28 bp, synthetic construct
  source 1..28: mol_type = other DNA
agaaagaaaaccctaaaaaccaccctgg

SEQ ID NO: 1839 - DNA, 28 bp, synthetic construct
  source 1..28: mol_type = other DNA
aatcatcaactgtggagaagaagaaggg

SEQ ID NO: 1840 - DNA, 28 bp, synthetic construct
  source 1..28: mol_type = other DNA
aaatcatcaactgtggagaagaagaagg

SEQ ID NO: 1841 - DNA, 28 bp, synthetic construct
  source 1..28: mol_type = other DNA
tttttctgcagaaaatcatcaactgtgg

SEQ ID NO: 1842 - DNA, 28 bp, synthetic construct
  source 1..28: mol_type = other DNA
cggtgatgggaactggaaatgaaatagg

SEQ ID NO: 1843 - DNA, 28 bp, synthetic construct
  source 1..28: mol_type = other DNA
atgtggaaatcgcggtgatgggaactgg

SEQ ID NO: 1844 - DNA, 28 bp, synthetic construct
  source 1..28: mol_type = other DNA
agttcccatcaccgcgatttccacatgg

SEQ ID NO: 1845 - DNA, 28 bp, synthetic construct
  source 1..28: mol_type = other DNA
acatccatgtggaaatcgcggtgatggg

SEQ ID NO: 1846 - DNA, 28 bp, synthetic construct
  source 1..28: mol_type = other DNA
cacatccatgtggaaatcgcggtgatgg

SEQ ID NO: 1847 - DNA, 28 bp, synthetic construct
  source 1..28: mol_type = other DNA
tcacgtcacatccatgtggaaatcgcgg

SEQ ID NO: 1848 - DNA, 28 bp, synthetic construct
  source 1..28: mol_type = other DNA
aagctggggtcacgtcacatccatgtgg

SEQ ID NO: 1849 - DNA, 28 bp, synthetic construct
  source 1..28: mol_type = other DNA
cgtgaccccagcttccgaaatgcccagg

SEQ ID NO: 1850 - DNA, 28 bp, synthetic construct
  source 1..28: mol_type = other DNA
agtcacctgggcatttcggaagctgggg

SEQ ID NO: 1851 - DNA, 28 bp, synthetic construct
  source 1..28: mol_type = other DNA
gagtcacctgggcatttcggaagctggg

SEQ ID NO: 1852 - DNA, 28 bp, synthetic construct
  source 1..28: mol_type = other DNA
tgagtcacctgggcatttcggaagctgg

SEQ ID NO: 1853 - DNA, 28 bp, synthetic construct
  source 1..28: mol_type = other DNA
ttccgaaatgcccaggtgactcacgcgg

SEQ ID NO: 1854 - DNA, 28 bp, synthetic construct
  source 1..28: mol_type = other DNA
tccgaaatgcccaggtgactcacgcggg

SEQ ID NO: 1855 - DNA, 28 bp, synthetic construct
  source 1..28: mol_type = other DNA
ccgaaatgcccaggtgactcacgcgggg

SEQ ID NO: 1856 - DNA, 28 bp, synthetic construct
  source 1..28: mol_type = other DNA
cggggtgtccccgcgtgagtcacctggg

SEQ ID NO: 1857 - DNA, 28 bp, synthetic construct
  source 1..28: mol_type = other DNA
ccaggtgactcacgcggggacaccccgg

SEQ ID NO: 1858 - DNA, 28 bp, synthetic construct
  source 1..28: mol_type = other DNA
caggtgactcacgcggggacaccccggg

SEQ ID NO: 1859 - DNA, 28 bp, synthetic construct
  source 1..28: mol_type = other DNA
aggtgactcacgcggggacaccccgggg

SEQ ID NO: 1860 - DNA, 28 bp, synthetic construct
  source 1..28: mol_type = other DNA
cagactgcgcagtctgcagtcttcgtgg

SEQ ID NO: 1861 - DNA, 28 bp, synthetic construct
  source 1..28: mol_type = other DNA
actgcgcagtctgcagtcttcgtggcgg

SEQ ID NO: 1862 - DNA, 28 bp, synthetic construct
  source 1..28: mol_type = other DNA
ctgcgcagtctgcagtcttcgtggcggg

SEQ ID NO: 1863 - DNA, 28 bp, synthetic construct
  source 1..28: mol_type = other DNA
gtcttcgtggcgggccaagcgagcttgg

SEQ ID NO: 1864 - DNA, 28 bp, synthetic construct
  source 1..28: mol_type = other DNA
gcgggccaagcgagcttggagcccgcgg

SEQ ID NO: 1865 - DNA, 28 bp, synthetic construct
  source 1..28: mol_type = other DNA
cgggccaagcgagcttggagcccgcggg

SEQ ID NO: 1866 - DNA, 28 bp, synthetic construct
  source 1..28: mol_type = other DNA
gggccaagcgagcttggagcccgcgggg

SEQ ID NO: 1867 - DNA, 28 bp, synthetic construct
  source 1..28: mol_type = other DNA
ggccaagcgagcttggagcccgcggggg

SEQ ID NO: 1868 - DNA, 28 bp, synthetic construct
  source 1..28: mol_type = other DNA
cgcccccgcgggctccaagctcgcttgg

SEQ ID NO: 1869 - DNA, 28 bp, synthetic construct
  source 1..28: mol_type = other DNA
caagcgagcttggagcccgcgggggcgg

SEQ ID NO: 1870 - DNA, 28 bp, synthetic construct
  source 1..28: mol_type = other DNA
gagcttggagcccgcgggggcggagcgg

SEQ ID NO: 1871 - DNA, 28 bp, synthetic construct
  source 1..28: mol_type = other DNA
gcccgcgggggcggagcggtgagagcgg

SEQ ID NO: 1872 - DNA, 28 bp, synthetic construct
  source 1..28: mol_type = other DNA
gccgctctcaccgctccgcccccgcggg

SEQ ID NO: 1873 - DNA, 28 bp, synthetic construct
  source 1..28: mol_type = other DNA
ggccgctctcaccgctccgcccccgcgg

SEQ ID NO: 1874 - DNA, 28 bp, synthetic construct
  source 1..28: mol_type = other DNA
cggctgggggtgtgatctctcttggcgg

SEQ ID NO: 1875 - DNA, 28 bp, synthetic construct
  source 1..28: mol_type = other DNA
ggtcggctgggggtgtgatctctcttgg

SEQ ID NO: 1876 - DNA, 28 bp, synthetic construct
  source 1..28: mol_type = other DNA
ctcgctcgctggcagggtcggctggggg

SEQ ID NO: 1877 - DNA, 28 bp, synthetic construct
  source 1..28: mol_type = other DNA
gctcgctcgctggcagggtcggctgggg

SEQ ID NO: 1878 - DNA, 28 bp, synthetic construct
  source 1..28: mol_type = other DNA
ggctcgctcgctggcagggtcggctggg

SEQ ID NO: 1879 - DNA, 28 bp, synthetic construct
  source 1..28: mol_type = other DNA
gggctcgctcgctggcagggtcggctgg

SEQ ID NO: 1880 - DNA, 28 bp, synthetic construct
  source 1..28: mol_type = other DNA
ggtcgggctcgctcgctggcagggtcgg

SEQ ID NO: 1881 - DNA, 28 bp, synthetic construct
  source 1..28: mol_type = other DNA
ctggggtcgggctcgctcgctggcaggg

SEQ ID NO: 1882 - DNA, 28 bp, synthetic construct
  source 1..28: mol_type = other DNA
cctgccagcgagcgagcccgaccccagg

SEQ ID NO: 1883 - DNA, 28 bp, synthetic construct
  source 1..28: mol_type = other DNA
gacgcctggggtcgggctcgctcgctgg

SEQ ID NO: 1884 - DNA, 28 bp, synthetic construct
  source 1..28: mol_type = other DNA
gagcgagcccgaccccaggcgtccatgg

SEQ ID NO: 1885 - DNA, 28 bp, synthetic construct
  source 1..28: mol_type = other DNA
cgacgctccatggacgcctggggtcggg

SEQ ID NO: 1886 - DNA, 28 bp, synthetic construct
  source 1..28: mol_type = other DNA
gcgacgctccatggacgcctggggtcgg

SEQ ID NO: 1887 - DNA, 28 bp, synthetic construct
  source 1..28: mol_type = other DNA
ggaggcgacgctccatggacgcctgggg

SEQ ID NO: 1888 - DNA, 28 bp, synthetic construct
  source 1..28: mol_type = other DNA
cggaggcgacgctccatggacgcctggg

SEQ ID NO: 1889 - DNA, 28 bp, synthetic construct
  source 1..28: mol_type = other DNA
gcggaggcgacgctccatggacgcctgg

SEQ ID NO: 1890 - DNA, 28 bp, synthetic construct
  source 1..28: mol_type = other DNA
gcgtccatggagcgtcgcctccgcccgg

SEQ ID NO: 1891 - DNA, 28 bp, synthetic construct
  source 1..28: mol_type = other DNA
gggaccgggcggaggcgacgctccatgg

SEQ ID NO: 1892 - DNA, 28 bp, synthetic construct
  source 1..28: mol_type = other DNA
gggggtcggggcagggaccgggcggagg

SEQ ID NO: 1893 - DNA, 28 bp, synthetic construct
  source 1..28: mol_type = other DNA
ggcgggggtcggggcagggaccgggcgg

SEQ ID NO: 1894 - DNA, 28 bp, synthetic construct
  source 1..28: mol_type = other DNA
gcaggcgggggtcggggcagggaccggg

SEQ ID NO: 1895 - DNA, 28 bp, synthetic construct
  source 1..28: mol_type = other DNA
cgcaggcgggggtcggggcagggaccgg

SEQ ID NO: 1896 - DNA, 28 bp, synthetic construct
  source 1..28: mol_type = other DNA
cggtccctgccccgacccccgcctgcgg

SEQ ID NO: 1897 - DNA, 28 bp, synthetic construct
  source 1..28: mol_type = other DNA
cgcgccgcaggcgggggtcggggcaggg

SEQ ID NO: 1898 - DNA, 28 bp, synthetic construct
  source 1..28: mol_type = other DNA
gcgcgccgcaggcgggggtcggggcagg

SEQ ID NO: 1899 - DNA, 28 bp, synthetic construct
  source 1..28: mol_type = other DNA
aggagcgcgccgcaggcgggggtcgggg

SEQ ID NO: 1900 - DNA, 28 bp, synthetic construct
  source 1..28: mol_type = other DNA
caggagcgcgccgcaggcgggggtcggg

SEQ ID NO: 1901 - DNA, 28 bp, synthetic construct
  source 1..28: mol_type = other DNA
gcaggagcgcgccgcaggcgggggtcgg

SEQ ID NO: 1902 - DNA, 28 bp, synthetic construct
  source 1..28: mol_type = other DNA
caaggcaggagcgcgccgcaggcggggg

SEQ ID NO: 1903 - DNA, 28 bp, synthetic construct
  source 1..28: mol_type = other DNA
tcaaggcaggagcgcgccgcaggcgggg

SEQ ID NO: 1904 - DNA, 28 bp, synthetic construct
  source 1..28: mol_type = other DNA
gtcaaggcaggagcgcgccgcaggcggg

SEQ ID NO: 1905 - DNA, 28 bp, synthetic construct
  source 1..28: mol_type = other DNA
ggtcaaggcaggagcgcgccgcaggcgg

SEQ ID NO: 1906 - DNA, 28 bp, synthetic construct
  source 1..28: mol_type = other DNA
cctgcggcgcgctcctgccttgaccagg

SEQ ID NO: 1907 - DNA, 28 bp, synthetic construct
  source 1..28: mol_type = other DNA
gcgcgctcctgccttgaccaggacttgg

SEQ ID NO: 1908 - DNA, 28 bp, synthetic construct
  source 1..28: mol_type = other DNA
cgcgctcctgccttgaccaggacttggg

SEQ ID NO: 1909 - DNA, 28 bp, synthetic construct
  source 1..28: mol_type = other DNA
caaagtcccaagtcctggtcaaggcagg

SEQ ID NO: 1910 - DNA, 28 bp, synthetic construct
  source 1..28: mol_type = other DNA
ttcgcaaagtcccaagtcctggtcaagg

SEQ ID NO: 1911 - DNA, 28 bp, synthetic construct
  source 1..28: mol_type = other DNA
tgaccaggacttgggactttgcgaaagg

SEQ ID NO: 1912 - DNA, 28 bp, synthetic construct
  source 1..28: mol_type = other DNA
gatcctttcgcaaagtcccaagtcctgg

SEQ ID NO: 1913 - DNA, 28 bp, synthetic construct
  source 1..28: mol_type = other DNA
gacttgggactttgcgaaaggatcgcgg

SEQ ID NO: 1914 - DNA, 28 bp, synthetic construct
  source 1..28: mol_type = other DNA
acttgggactttgcgaaaggatcgcggg

SEQ ID NO: 1915 - DNA, 28 bp, synthetic construct
  source 1..28: mol_type = other DNA
cttgggactttgcgaaaggatcgcgggg

SEQ ID NO: 1916 - DNA, 28 bp, synthetic construct
  source 1..28: mol_type = other DNA
gactttgcgaaaggatcgcggggcccgg

SEQ ID NO: 1917 - DNA, 28 bp, synthetic construct
  source 1..28: mol_type = other DNA
tgcgaaaggatcgcggggcccggagagg

SEQ ID NO: 1918 - DNA, 28 bp, synthetic construct
  source 1..28: mol_type = other DNA
cgggaggcgcggcggttacctctccggg

SEQ ID NO: 1919 - DNA, 28 bp, synthetic construct
  source 1..28: mol_type = other DNA
ccggagaggtaaccgccgcgcctcccgg

SEQ ID NO: 1920 - DNA, 28 bp, synthetic construct
  source 1..28: mol_type = other DNA
gaggtaaccgccgcgcctcccggagagg

SEQ ID NO: 1921 - DNA, 28 bp, synthetic construct
  source 1..28: mol_type = other DNA
gcggttacctctccgggaggcgcggcgg

SEQ ID NO: 1922 - DNA, 28 bp, synthetic construct
  source 1..28: mol_type = other DNA
gcggcggttacctctccgggaggcgcgg

SEQ ID NO: 1923 - DNA, 28 bp, synthetic construct
  source 1..28: mol_type = other DNA
gaggcgcggcggttacctctccgggagg

SEQ ID NO: 1924 - DNA, 28 bp, synthetic construct
  source 1..28: mol_type = other DNA
cgggaggcgcggcggttacctctccggg

SEQ ID NO: 1925 - DNA, 28 bp, synthetic construct
  source 1..28: mol_type = other DNA
ccggagaggtaaccgccgcgcctcccgg

SEQ ID NO: 1926 - DNA, 28 bp, synthetic construct
  source 1..28: mol_type = other DNA
gaggtaaccgccgcgcctcccggagagg

SEQ ID NO: 1927 - DNA, 28 bp, synthetic construct
  source 1..28: mol_type = other DNA
gcggttacctctccgggaggcgcggcgg

SEQ ID NO: 1928 - DNA, 28 bp, synthetic construct
  source 1..28: mol_type = other DNA
gcggcggttacctctccgggaggcgcgg

SEQ ID NO: 1929 - DNA, 28 bp, synthetic construct
  source 1..28: mol_type = other DNA
gaggcgcggcggttacctctccgggagg

SEQ ID NO: 1930 - DNA, 28 bp, synthetic construct
  source 1..28: mol_type = other DNA
ggggaggcgcggcggttacctctccggg

SEQ ID NO: 1931 - DNA, 28 bp, synthetic construct
  source 1..28: mol_type = other DNA
cggggaggcgcggcggttacctctccgg

SEQ ID NO: 1932 - DNA, 28 bp, synthetic construct
  source 1..28: mol_type = other DNA
aggcagacggcacggggaggcgcggcgg

SEQ ID NO: 1933 - DNA, 28 bp, synthetic construct
  source 1..28: mol_type = other DNA
ccgcgcctccccgtgccgtctgcctcgg

SEQ ID NO: 1934 - DNA, 28 bp, synthetic construct
  source 1..28: mol_type = other DNA
cgcgcctccccgtgccgtctgcctcggg

SEQ ID NO: 1935 - DNA, 28 bp, synthetic construct
  source 1..28: mol_type = other DNA
tgagcccgaggcagacggcacggggagg

SEQ ID NO: 1936 - DNA, 28 bp, synthetic construct
  source 1..28: mol_type = other DNA
cggtgagcccgaggcagacggcacgggg

SEQ ID NO: 1937 - DNA, 28 bp, synthetic construct
  source 1..28: mol_type = other DNA
gcggtgagcccgaggcagacggcacggg

SEQ ID NO: 1938 - DNA, 28 bp, synthetic construct
  source 1..28: mol_type = other DNA
tgcggtgagcccgaggcagacggcacgg

SEQ ID NO: 1939 - DNA, 28 bp, synthetic construct
  source 1..28: mol_type = other DNA
ttgactgcggtgagcccgaggcagacgg

SEQ ID NO: 1940 - DNA, 28 bp, synthetic construct
  source 1..28: mol_type = other DNA
gtctgcctcgggctcaccgcagtcaagg

SEQ ID NO: 1941 - DNA, 28 bp, synthetic construct
  source 1..28: mol_type = other DNA
tctgcctcgggctcaccgcagtcaaggg

SEQ ID NO: 1942 - DNA, 28 bp, synthetic construct
  source 1..28: mol_type = other DNA
gcagcccttgactgcggtgagcccgagg

SEQ ID NO: 1943 - DNA, 28 bp, synthetic construct
  source 1..28: mol_type = other DNA
tcgggctcaccgcagtcaagggctgcgg

SEQ ID NO: 1944 - DNA, 28 bp, synthetic construct
  source 1..28: mol_type = other DNA
cgggctcaccgcagtcaagggctgcggg

SEQ ID NO: 1945 - DNA, 28 bp, synthetic construct
  source 1..28: mol_type = other DNA
aacatgcacccgcagcccttgactgcgg

SEQ ID NO: 1946 - DNA, 28 bp, synthetic construct
  source 1..28: mol_type = other DNA
gcagtcaagggctgcgggtgcatgttgg

SEQ ID NO: 1947 - DNA, 28 bp, synthetic construct
  source 1..28: mol_type = other DNA
cagtcaagggctgcgggtgcatgttggg

SEQ ID NO: 1948 - DNA, 28 bp, synthetic construct
  source 1..28: mol_type = other DNA
cgggtgcatgttgggcagcgacccccgg

SEQ ID NO: 1949 - DNA, 28 bp, synthetic construct
  source 1..28: mol_type = other DNA
gggtgcatgttgggcagcgacccccggg

SEQ ID NO: 1950 - DNA, 28 bp, synthetic construct
  source 1..28: mol_type = other DNA
gcatgttgggcagcgacccccgggctgg

SEQ ID NO: 1951 - DNA, 28 bp, synthetic construct
  source 1..28: mol_type = other DNA
gacccccgggctggcaccgtctacctgg

SEQ ID NO: 1952 - DNA, 28 bp, synthetic construct
  source 1..28: mol_type = other DNA
cgccaggtagacggtgccagcccggggg

SEQ ID NO: 1953 - DNA, 28 bp, synthetic construct
  source 1..28: mol_type = other DNA
acgccaggtagacggtgccagcccgggg

SEQ ID NO: 1954 - DNA, 28 bp, synthetic construct
  source 1..28: mol_type = other DNA
aacgccaggtagacggtgccagcccggg

SEQ ID NO: 1955 - DNA, 28 bp, synthetic construct
  source 1..28: mol_type = other DNA
caacgccaggtagacggtgccagcccgg

SEQ ID NO: 1956 - DNA, 28 bp, synthetic construct
  source 1..28: mol_type = other DNA
cgggctggcaccgtctacctggcgttgg

SEQ ID NO: 1957 - DNA, 28 bp, synthetic construct
  source 1..28: mol_type = other DNA
cgctgcaaaaccaacgccaggtagacgg

SEQ ID NO: 1958 - DNA, 28 bp, synthetic construct
  source 1..28: mol_type = other DNA
cctggcgttggttttgcagcgctcctgg

SEQ ID NO: 1959 - DNA, 28 bp, synthetic construct
  source 1..28: mol_type = other DNA
cgttggttttgcagcgctcctggactgg

SEQ ID NO: 1960 - DNA, 28 bp, synthetic construct
  source 1..28: mol_type = other DNA
gttggttttgcagcgctcctggactggg

SEQ ID NO: 1961 - DNA, 28 bp, synthetic construct
  source 1..28: mol_type = other DNA
cagcgctcctggactgggagtttgttgg

SEQ ID NO: 1962 - DNA, 28 bp, synthetic construct
  source 1..28: mol_type = other DNA
gaaacgtccaacaaactcccagtccagg

SEQ ID NO: 1963 - DNA, 28 bp, synthetic construct
  source 1..28: mol_type = other DNA
tgggagtttgttggacgtttctgtctgg

SEQ ID NO: 1964 - DNA, 28 bp, synthetic construct
  source 1..28: mol_type = other DNA
gggagtttgttggacgtttctgtctggg

SEQ ID NO: 1965 - DNA, 28 bp, synthetic construct
  source 1..28: mol_type = other DNA
cgtttctgtctgggttttgaagtgctgg

SEQ ID NO: 1966 - DNA, 28 bp, synthetic construct
  source 1..28: mol_type = other DNA
gtttctgtctgggttttgaagtgctggg

SEQ ID NO: 1967 - DNA, 28 bp, synthetic construct
  source 1..28: mol_type = other DNA
ctgggttttgaagtgctgggagttgagg

SEQ ID NO: 1968 - DNA, 28 bp, synthetic construct
  source 1..28: mol_type = other DNA
ctgggagttgaggtcactgctgcagagg

SEQ ID NO: 1969 - DNA, 28 bp, synthetic construct
  source 1..28: mol_type = other DNA
gagttgaggtcactgctgcagaggttgg

SEQ ID NO: 1970 - DNA, 28 bp, synthetic construct
  source 1..28: mol_type = other DNA
gctgcagaggttggagtgacagccctgg

SEQ ID NO: 1971 - DNA, 28 bp, synthetic construct
  source 1..28: mol_type = other DNA
aggaacagctggctggaggtatccaggg

SEQ ID NO: 1972 - DNA, 28 bp, synthetic construct
  source 1..28: mol_type = other DNA
aaggaacagctggctggaggtatccagg

SEQ ID NO: 1973 - DNA, 28 bp, synthetic construct
  source 1..28: mol_type = other DNA
ttatctgaaaggaacagctggctggagg

SEQ ID NO: 1974 - DNA, 28 bp, synthetic construct
  source 1..28: mol_type = other DNA
gcattatctgaaaggaacagctggctgg

SEQ ID NO: 1975 - DNA, 28 bp, synthetic construct
  source 1..28: mol_type = other DNA
ccagctgttcctttcagataatgcacgg

SEQ ID NO: 1976 - DNA, 28 bp, synthetic construct
  source 1..28: mol_type = other DNA
gcttaagttccgtgcattatctgaaagg

SEQ ID NO: 1977 - DNA, 28 bp, synthetic construct
  source 1..28: mol_type = other DNA
gcacggaacttaagctgcagctgactgg

SEQ ID NO: 1978 - DNA, 28 bp, synthetic construct
  source 1..28: mol_type = other DNA
cttaagctgcagctgactggtgaagagg

SEQ ID NO: 1979 - DNA, 28 bp, synthetic construct
  source 1..28: mol_type = other DNA
agctgactggtgaagaggcgcccctcgg

SEQ ID NO: 1980 - DNA, 28 bp, synthetic construct
  source 1..28: mol_type = other DNA
gctgactggtgaagaggcgcccctcggg

SEQ ID NO: 1981 - DNA, 28 bp, synthetic construct
  source 1..28: mol_type = other DNA
agaggcgcccctcgggccctccgatcgg

SEQ ID NO: 1982 - DNA, 28 bp, synthetic construct
  source 1..28: mol_type = other DNA
gaggcgcccctcgggccctccgatcggg

SEQ ID NO: 1983 - DNA, 28 bp, synthetic construct
  source 1..28: mol_type = other DNA
gcgcccctcgggccctccgatcgggtgg

SEQ ID NO: 1984 - DNA, 28 bp, synthetic construct
  source 1..28: mol_type = other DNA
cgaccacccgatcggagggcccgagggg

SEQ ID NO: 1985 - DNA, 28 bp, synthetic construct
  source 1..28: mol_type = other DNA
acgaccacccgatcggagggcccgaggg

SEQ ID NO: 1986 - DNA, 28 bp, synthetic construct
  source 1..28: mol_type = other DNA
aacgaccacccgatcggagggcccgagg

SEQ ID NO: 1987 - DNA, 28 bp, synthetic construct
  source 1..28: mol_type = other DNA
tcgggccctccgatcgggtggtcgttgg

SEQ ID NO: 1988 - DNA, 28 bp, synthetic construct
  source 1..28: mol_type = other DNA
aagcgccaacgaccacccgatcggaggg

SEQ ID NO: 1989 - DNA, 28 bp, synthetic construct
  source 1..28: mol_type = other DNA
aaagcgccaacgaccacccgatcggagg

SEQ ID NO: 1990 - DNA, 28 bp, synthetic construct
  source 1..28: mol_type = other DNA
agcaaagcgccaacgaccacccgatcgg

SEQ ID NO: 1991 - DNA, 28 bp, synthetic construct
  source 1..28: mol_type = other DNA
cgctttgctcctttcgtgtcttttttgg

SEQ ID NO: 1992 - DNA, 28 bp, synthetic construct
  source 1..28: mol_type = other DNA
cgcttggctccaaaaaagacacgaaagg

SEQ ID NO: 1993 - DNA, 28 bp, synthetic construct
  source 1..28: mol_type = other DNA
tttggagccaagcgttgcatgctcatgg

SEQ ID NO: 1994 - DNA, 28 bp, synthetic construct
  source 1..28: mol_type = other DNA
tacgtggccatgagcatgcaacgcttgg

SEQ ID NO: 1995 - DNA, 28 bp, synthetic construct
  source 1..28: mol_type = other DNA
ccacgtagaccttgcagaagcgctgcgg

SEQ ID NO: 1996 - DNA, 28 bp, synthetic construct
  source 1..28: mol_type = other DNA
gggaaaaagccgcagcgcttctgcaagg

SEQ ID NO: 1997 - DNA, 28 bp, synthetic construct
  source 1..28: mol_type = other DNA
gctgcggctttttcccaaattgtgcagg

SEQ ID NO: 1998 - DNA, 28 bp, synthetic construct
  source 1..28: mol_type = other DNA
cccaaattgtgcaggaccagcccgacgg

SEQ ID NO: 1999 - DNA, 28 bp, synthetic construct
  source 1..28: mol_type = other DNA
ccaaattgtgcaggaccagcccgacggg

SEQ ID NO: 2000 - DNA, 28 bp, synthetic construct
  source 1..28: mol_type = other DNA
caaattgtgcaggaccagcccgacgggg

SEQ ID NO: 2001 - DNA, 28 bp, synthetic construct
  source 1..28: mol_type = other DNA
gtgcaggaccagcccgacggggcgtagg

SEQ ID NO: 2002 - DNA, 28 bp, synthetic construct
  source 1..28: mol_type = other DNA
tgcaggaccagcccgacggggcgtaggg

SEQ ID NO: 2003 - DNA, 28 bp, synthetic construct
  source 1..28: mol_type = other DNA
tgcggtaccctacgccccgtcgggctgg

SEQ ID NO: 2004 - DNA, 28 bp, synthetic construct
  source 1..28: mol_type = other DNA
cccgacggggcgtagggtaccgcagtgg

SEQ ID NO: 2005 - DNA, 28 bp, synthetic construct
  source 1..28: mol_type = other DNA
gccactgcggtaccctacgccccgtcgg

SEQ ID NO: 2006 - DNA, 28 bp, synthetic construct
  source 1..28: mol_type = other DNA
tagggtaccgcagtggccgccagcccgg

SEQ ID NO: 2007 - DNA, 28 bp, synthetic construct
  source 1..28: mol_type = other DNA
ggtaccgcagtggccgccagcccggcgg

SEQ ID NO: 2008 - DNA, 28 bp, synthetic construct
  source 1..28: mol_type = other DNA
accgcagtggccgccagcccggcggagg

SEQ ID NO: 2009 - DNA, 28 bp, synthetic construct
  source 1..28: mol_type = other DNA
acctccgccgggctggcggccactgcgg

SEQ ID NO: 2010 - DNA, 28 bp, synthetic construct
  source 1..28: mol_type = other DNA
gcagtggccgccagcccggcggaggtgg

SEQ ID NO: 2011 - DNA, 28 bp, synthetic construct
  source 1..28: mol_type = other DNA
cagtggccgccagcccggcggaggtggg

SEQ ID NO: 2012 - DNA, 28 bp, synthetic construct
  source 1..28: mol_type = other DNA
agtggccgccagcccggcggaggtgggg

SEQ ID NO: 2013 - DNA, 28 bp, synthetic construct
  source 1..28: mol_type = other DNA
gtggccgccagcccggcggaggtggggg

SEQ ID NO: 2014 - DNA, 28 bp, synthetic construct
  source 1..28: mol_type = other DNA
tggccgccagcccggcggaggtgggggg

SEQ ID NO: 2015 - DNA, 28 bp, synthetic construct
  source 1..28: mol_type = other DNA
aagccccccacctccgccgggctggcgg

SEQ ID NO: 2016 - DNA, 28 bp, synthetic construct
  source 1..28: mol_type = other DNA
ctgaagccccccacctccgccgggctgg

SEQ ID NO: 2017 - DNA, 28 bp, synthetic construct
  source 1..28: mol_type = other DNA
gggactgaagccccccacctccgccggg

SEQ ID NO: 2018 - DNA, 28 bp, synthetic construct
  source 1..28: mol_type = other DNA
tgggactgaagccccccacctccgccgg

SEQ ID NO: 2019 - DNA, 28 bp, synthetic construct
  source 1..28: mol_type = other DNA
cgtgagcgtctgggaagctgtctctggg

SEQ ID NO: 2020 - DNA, 28 bp, synthetic construct
  source 1..28: mol_type = other DNA
ccagagacagcttcccagacgctcacgg

SEQ ID NO: 2021 - DNA, 28 bp, synthetic construct
  source 1..28: mol_type = other DNA
cagagacagcttcccagacgctcacggg

SEQ ID NO: 2022 - DNA, 28 bp, synthetic construct
  source 1..28: mol_type = other DNA
ttcccagacgctcacgggtccttgcagg

SEQ ID NO: 2023 - DNA, 28 bp, synthetic construct
  source 1..28: mol_type = other DNA
tcccagacgctcacgggtccttgcaggg

SEQ ID NO: 2024 - DNA, 28 bp, synthetic construct
  source 1..28: mol_type = other DNA
cccagacgctcacgggtccttgcagggg

SEQ ID NO: 2025 - DNA, 28 bp, synthetic construct
  source 1..28: mol_type = other DNA
ccagacgctcacgggtccttgcaggggg

SEQ ID NO: 2026 - DNA, 28 bp, synthetic construct
  source 1..28: mol_type = other DNA
acgctcacgggtccttgcagggggctgg

SEQ ID NO: 2027 - DNA, 28 bp, synthetic construct
  source 1..28: mol_type = other DNA
cgctcacgggtccttgcagggggctggg

SEQ ID NO: 2028 - DNA, 28 bp, synthetic construct
  source 1..28: mol_type = other DNA
gctcacgggtccttgcagggggctgggg

SEQ ID NO: 2029 - DNA, 28 bp, synthetic construct
  source 1..28: mol_type = other DNA
gggtccttgcagggggctggggtcctgg

SEQ ID NO: 2030 - DNA, 28 bp, synthetic construct
  source 1..28: mol_type = other DNA
cgcgccaggaccccagccccctgcaagg

SEQ ID NO: 2031 - DNA, 28 bp, synthetic construct
  source 1..28: mol_type = other DNA
cttgcagggggctggggtcctggcgcgg

SEQ ID NO: 2032 - DNA, 28 bp, synthetic construct
  source 1..28: mol_type = other DNA
ttgcagggggctggggtcctggcgcggg

SEQ ID NO: 2033 - DNA, 28 bp, synthetic construct
  source 1..28: mol_type = other DNA
tgcagggggctggggtcctggcgcgggg

SEQ ID NO: 2034 - DNA, 28 bp, synthetic construct
  source 1..28: mol_type = other DNA
tactggaaaagctgaaccccgcgccagg

SEQ ID NO: 2035 - DNA, 28 bp, synthetic construct
  source 1..28: mol_type = other DNA
catacttctcttacactgctgctactgg

SEQ ID NO: 2036 - DNA, 28 bp, synthetic construct
  source 1..28: mol_type = other DNA
tgtaagagaagtatgcatgtagacgtgg

SEQ ID NO: 2037 - DNA, 28 bp, synthetic construct
  source 1..28: mol_type = other DNA
gtaagagaagtatgcatgtagacgtggg

SEQ ID NO: 2038 - DNA, 28 bp, synthetic construct
  source 1..28: mol_type = other DNA
aagtatgcatgtagacgtgggtcgctgg

SEQ ID NO: 2039 - DNA, 28 bp, synthetic construct
  source 1..28: mol_type = other DNA
ggcccctgctccagcccctaccccacgg

SEQ ID NO: 2040 - DNA, 28 bp, synthetic construct
  source 1..28: mol_type = other DNA
aaccgtggggtaggggctggagcagggg

SEQ ID NO: 2041 - DNA, 28 bp, synthetic construct
  source 1..28: mol_type = other DNA
taaccgtggggtaggggctggagcaggg

SEQ ID NO: 2042 - DNA, 28 bp, synthetic construct
  source 1..28: mol_type = other DNA
ctaaccgtggggtaggggctggagcagg

SEQ ID NO: 2043 - DNA, 28 bp, synthetic construct
  source 1..28: mol_type = other DNA
gacagtctaaccgtggggtaggggctgg

SEQ ID NO: 2044 - DNA, 28 bp, synthetic construct
  source 1..28: mol_type = other DNA
caaagacagtctaaccgtggggtagggg

SEQ ID NO: 2045 - DNA, 28 bp, synthetic construct
  source 1..28: mol_type = other DNA
acaaagacagtctaaccgtggggtaggg

SEQ ID NO: 2046 - DNA, 28 bp, synthetic construct
  source 1..28: mol_type = other DNA
gacaaagacagtctaaccgtggggtagg

SEQ ID NO: 2047 - DNA, 28 bp, synthetic construct
  source 1..28: mol_type = other DNA
agctgacaaagacagtctaaccgtgggg

SEQ ID NO: 2048 - DNA, 28 bp, synthetic construct
  source 1..28: mol_type = other DNA
cagctgacaaagacagtctaaccgtggg

SEQ ID NO: 2049 - DNA, 28 bp, synthetic construct
  source 1..28: mol_type = other DNA
ccacggttagactgtctttgtcagctgg

SEQ ID NO: 2050 - DNA, 28 bp, synthetic construct
  source 1..28: mol_type = other DNA
tggagtcgtcccacatcctgccacctgg

SEQ ID NO: 2051 - DNA, 28 bp, synthetic construct
  source 1..28: mol_type = other DNA
tctgagaggccaggtggcaggatgtggg

SEQ ID NO: 2052 - DNA, 28 bp, synthetic construct
  source 1..28: mol_type = other DNA
ttctgagaggccaggtggcaggatgtgg

SEQ ID NO: 2053 - DNA, 28 bp, synthetic construct
  source 1..28: mol_type = other DNA
ctgcttttctgagaggccaggtggcagg

SEQ ID NO: 2054 - DNA, 28 bp, synthetic construct
  source 1..28: mol_type = other DNA
gccacctggcctctcagaaaagcagtgg

SEQ ID NO: 2055 - DNA, 28 bp, synthetic construct
  source 1..28: mol_type = other DNA
gccactgcttttctgagaggccaggtgg

SEQ ID NO: 2056 - DNA, 28 bp, synthetic construct
  source 1..28: mol_type = other DNA
aatgccactgcttttctgagaggccagg

SEQ ID NO: 2057 - DNA, 28 bp, synthetic construct
  source 1..28: mol_type = other DNA
tacttaatgccactgcttttctgagagg

SEQ ID NO: 2058 - DNA, 28 bp, synthetic construct
  source 1..28: mol_type = other DNA
ctcagaaaagcagtggcattaagtaagg

SEQ ID NO: 2059 - DNA, 28 bp, synthetic construct
  source 1..28: mol_type = other DNA
gaaaagcagtggcattaagtaaggaagg

SEQ ID NO: 2060 - DNA, 28 bp, synthetic construct
  source 1..28: mol_type = other DNA
gaacagcactggatttggggagtactgg

SEQ ID NO: 2061 - DNA, 28 bp, synthetic construct
  source 1..28: mol_type = other DNA
gtactccccaaatccagtgctgttcagg

SEQ ID NO: 2062 - DNA, 28 bp, synthetic construct
  source 1..28: mol_type = other DNA
tactccccaaatccagtgctgttcaggg

SEQ ID NO: 2063 - DNA, 28 bp, synthetic construct
  source 1..28: mol_type = other DNA
tccccaaatccagtgctgttcagggtgg

SEQ ID NO: 2064 - DNA, 28 bp, synthetic construct
  source 1..28: mol_type = other DNA
gccaccctgaacagcactggatttgggg

SEQ ID NO: 2065 - DNA, 28 bp, synthetic construct
  source 1..28: mol_type = other DNA
ggccaccctgaacagcactggatttggg

SEQ ID NO: 2066 - DNA, 28 bp, synthetic construct
  source 1..28: mol_type = other DNA
aggccaccctgaacagcactggatttgg

SEQ ID NO: 2067 - DNA, 28 bp, synthetic construct
  source 1..28: mol_type = other DNA
attctgaggccaccctgaacagcactgg

SEQ ID NO: 2068 - DNA, 28 bp, synthetic construct
  source 1..28: mol_type = other DNA
tgttcagggtggcctcagaatgaaacgg

SEQ ID NO: 2069 - DNA, 28 bp, synthetic construct
  source 1..28: mol_type = other DNA
gttcagggtggcctcagaatgaaacggg

SEQ ID NO: 2070 - DNA, 28 bp, synthetic construct
  source 1..28: mol_type = other DNA
caacttaagctcccgtttcattctgagg

SEQ ID NO: 2071 - DNA, 28 bp, synthetic construct
  source 1..28: mol_type = other DNA
ctcagaatgaaacgggagcttaagttgg

SEQ ID NO: 2072 - DNA, 28 bp, synthetic construct
  source 1..28: mol_type = other DNA
gaaacgggagcttaagttggttttgagg

SEQ ID NO: 2073 - DNA, 28 bp, synthetic construct
  source 1..28: mol_type = other DNA
ggagcagtacctgttgctgacagacagg

SEQ ID NO: 2074 - DNA, 28 bp, synthetic construct
  source 1..28: mol_type = other DNA
gagcagtacctgttgctgacagacaggg

SEQ ID NO: 2075 - DNA, 28 bp, synthetic construct
  source 1..28: mol_type = other DNA
agtacctgttgctgacagacagggttgg

SEQ ID NO: 2076 - DNA, 28 bp, synthetic construct
  source 1..28: mol_type = other DNA
ggagccaaccctgtctgtcagcaacagg

SEQ ID NO: 2077 - DNA, 28 bp, synthetic construct
  source 1..28: mol_type = other DNA
aaacagtccagtgtgagttaatctctgg

SEQ ID NO: 2078 - DNA, 28 bp, synthetic construct
  source 1..28: mol_type = other DNA
aacagtccagtgtgagttaatctctggg

SEQ ID NO: 2079 - DNA, 28 bp, synthetic construct
  source 1..28: mol_type = other DNA
acagtccagtgtgagttaatctctgggg

SEQ ID NO: 2080 - DNA, 28 bp, synthetic construct
  source 1..28: mol_type = other DNA
gctggccccagagattaactcacactgg

SEQ ID NO: 2081 - DNA, 28 bp, synthetic construct
  source 1..28: mol_type = other DNA
taatctctggggccagctagtatcccgg

SEQ ID NO: 2082 - DNA, 28 bp, synthetic construct
  source 1..28: mol_type = other DNA
aatctctggggccagctagtatcccggg

SEQ ID NO: 2083 - DNA, 28 bp, synthetic construct
  source 1..28: mol_type = other DNA
gggccagctagtatcccgggagtagagg

SEQ ID NO: 2084 - DNA, 28 bp, synthetic construct
  source 1..28: mol_type = other DNA
gcacctctactcccgggatactagctgg

SEQ ID NO: 2085 - DNA, 28 bp, synthetic construct
  source 1..28: mol_type = other DNA
aaaagatcttagcacctctactcccggg

SEQ ID NO: 2086 - DNA, 28 bp, synthetic construct
  source 1..28: mol_type = other DNA
caaaagatcttagcacctctactcccgg

SEQ ID NO: 2087 - DNA, 28 bp, synthetic construct
  source 1..28: mol_type = other DNA
tgctaagatcttttgcctacagatcagg

SEQ ID NO: 2088 - DNA, 28 bp, synthetic construct
  source 1..28: mol_type = other DNA
gctaagatcttttgcctacagatcaggg

SEQ ID NO: 2089 - DNA, 28 bp, synthetic construct
  source 1..28: mol_type = other DNA
tgatcttgtcattaccctgatctgtagg

SEQ ID NO: 2090 - DNA, 28 bp, synthetic construct
  source 1..28: mol_type = other DNA
tcagggtaatgacaagatcaaacactgg

SEQ ID NO: 2091 - DNA, 28 bp, synthetic construct
  source 1..28: mol_type = other DNA
cagggtaatgacaagatcaaacactggg

SEQ ID NO: 2092 - DNA, 28 bp, synthetic construct
  source 1..28: mol_type = other DNA
agggtaatgacaagatcaaacactgggg

SEQ ID NO: 2093 - DNA, 28 bp, synthetic construct
  source 1..28: mol_type = other DNA
aagatcaaacactggggtttcctgcagg

SEQ ID NO: 2094 - DNA, 28 bp, synthetic construct
  source 1..28: mol_type = other DNA
tggggtttcctgcaggcagctatagagg

SEQ ID NO: 2095 - DNA, 28 bp, synthetic construct
  source 1..28: mol_type = other DNA
atacgactcctctatagctgcctgcagg

SEQ ID NO: 2096 - DNA, 28 bp, synthetic construct
  source 1..28: mol_type = other DNA
gctatagaggagtcgtattaaagtcagg

SEQ ID NO: 2097 - DNA, 28 bp, synthetic construct
  source 1..28: mol_type = other DNA
tcgtattaaagtcaggctaatagaatgg

SEQ ID NO: 2098 - DNA, 28 bp, synthetic construct
  source 1..28: mol_type = other DNA
gctttttttttttcctttccttttcagg

SEQ ID NO: 2099 - DNA, 28 bp, synthetic construct
  source 1..28: mol_type = other DNA
tttttttcctttccttttcaggtgttgg

SEQ ID NO: 2100 - DNA, 28 bp, synthetic construct
  source 1..28: mol_type = other DNA
gtgctctccaacacctgaaaaggaaagg

SEQ ID NO: 2101 - DNA, 28 bp, synthetic construct
  source 1..28: mol_type = other DNA
ccttttcaggtgttggagagcacaatgg

SEQ ID NO: 2102 - DNA, 28 bp, synthetic construct
  source 1..28: mol_type = other DNA
caatatgcggaaagctgtgaagatacgg

SEQ ID NO: 2103 - DNA, 28 bp, synthetic construct
  source 1..28: mol_type = other DNA
aatatgcggaaagctgtgaagatacggg

SEQ ID NO: 2104 - DNA, 28 bp, synthetic construct
  source 1..28: mol_type = other DNA
cattagtaggtttaaaaatgtcttctgg

SEQ ID NO: 2105 - DNA, 28 bp, synthetic construct
  source 1..28: mol_type = other DNA
cagaagacatttttaaacctactaatgg

SEQ ID NO: 2106 - DNA, 28 bp, synthetic construct
  source 1..28: mol_type = other DNA
agaagacatttttaaacctactaatggg

SEQ ID NO: 2107 - DNA, 28 bp, synthetic construct
  source 1..28: mol_type = other DNA
taaaatgatgaatgatcccattagtagg

SEQ ID NO: 2108 - DNA, 28 bp, synthetic construct
  source 1..28: mol_type = other DNA
gaaactcaactggtgtcgagaagtccgg

SEQ ID NO: 2109 - DNA, 28 bp, synthetic construct
  source 1..28: mol_type = other DNA
atgtggggcgttcaggacacagacttgg

SEQ ID NO: 2110 - DNA, 28 bp, synthetic construct
  source 1..28: mol_type = other DNA
cgttcaggacacagacttggtactgagg

SEQ ID NO: 2111 - DNA, 28 bp, synthetic construct
  source 1..28: mol_type = other DNA
caggacacagacttggtactgaggaagg

SEQ ID NO: 2112 - DNA, 28 bp, synthetic construct
  source 1..28: mol_type = other DNA
aggaaggcgctgttcagcacgctcaagg

SEQ ID NO: 2113 - DNA, 28 bp, synthetic construct
  source 1..28: mol_type = other DNA
tggcaactggagtctctcaaatctcagg

SEQ ID NO: 2114 - DNA, 28 bp, synthetic construct
  source 1..28: mol_type = other DNA
ctcaaatctcaggaatttgttgaaacgg

SEQ ID NO: 2115 - DNA, 28 bp, synthetic construct
  source 1..28: mol_type = other DNA
tcaaatctcaggaatttgttgaaacggg

SEQ ID NO: 2116 - DNA, 28 bp, synthetic construct
  source 1..28: mol_type = other DNA
caaatctcaggaatttgttgaaacgggg

SEQ ID NO: 2117 - DNA, 28 bp, synthetic construct
  source 1..28: mol_type = other DNA
tgaaacggggctttgctatgatactcgg

SEQ ID NO: 2118 - DNA, 28 bp, synthetic construct
  source 1..28: mol_type = other DNA
gaaacggggctttgctatgatactcggg

SEQ ID NO: 2119 - DNA, 28 bp, synthetic construct
  source 1..28: mol_type = other DNA
cggggctttgctatgatactcgggtagg

SEQ ID NO: 2120 - DNA, 28 bp, synthetic construct
  source 1..28: mol_type = other DNA
tttttcaccccgctccccttagaactgg

SEQ ID NO: 2121 - DNA, 28 bp, synthetic construct
  source 1..28: mol_type = other DNA
catcattccagttctaaggggagcgggg

SEQ ID NO: 2122 - DNA, 28 bp, synthetic construct
  source 1..28: mol_type = other DNA
tcatcattccagttctaaggggagcggg

SEQ ID NO: 2123 - DNA, 28 bp, synthetic construct
  source 1..28: mol_type = other DNA
ttcatcattccagttctaaggggagcgg

SEQ ID NO: 2124 - DNA, 28 bp, synthetic construct
  source 1..28: mol_type = other DNA
ctccccttagaactggaatgatgaatgg

SEQ ID NO: 2125 - DNA, 28 bp, synthetic construct
  source 1..28: mol_type = other DNA
tccccttagaactggaatgatgaatggg

SEQ ID NO: 2126 - DNA, 28 bp, synthetic construct
  source 1..28: mol_type = other DNA
tcccattcatcattccagttctaagggg

SEQ ID NO: 2127 - DNA, 28 bp, synthetic construct
  source 1..28: mol_type = other DNA
gtcccattcatcattccagttctaaggg

SEQ ID NO: 2128 - DNA, 28 bp, synthetic construct
  source 1..28: mol_type = other DNA
tgtcccattcatcattccagttctaagg

SEQ ID NO: 2129 - DNA, 28 bp, synthetic construct
  source 1..28: mol_type = other DNA
gatgaatgggacaatcttatcaaaatgg

SEQ ID NO: 2130 - DNA, 28 bp, synthetic construct
  source 1..28: mol_type = other DNA
atttgtcctttgcaacatcctcagaagg

SEQ ID NO: 2131 - DNA, 28 bp, synthetic construct
  source 1..28: mol_type = other DNA
tttcaggtgagatgcctgcagatcacgg

SEQ ID NO: 2132 - DNA, 28 bp, synthetic construct
  source 1..28: mol_type = other DNA
attttgtctgttcaaagaaagagaaagg

SEQ ID NO: 2133 - DNA, 28 bp, synthetic construct
  source 1..28: mol_type = other DNA
tgaacagacaaaatgctaagaagtttgg

SEQ ID NO: 2134 - DNA, 28 bp, synthetic construct
  source 1..28: mol_type = other DNA
acaaaatgctaagaagtttggaatcagg

SEQ ID NO: 2135 - DNA, 28 bp, synthetic construct
  source 1..28: mol_type = other DNA
ggttccaatttcgcccctttgaaagtgg

SEQ ID NO: 2136 - DNA, 28 bp, synthetic construct
  source 1..28: mol_type = other DNA
gttccaatttcgcccctttgaaagtggg

SEQ ID NO: 2137 - DNA, 28 bp, synthetic construct
  source 1..28: mol_type = other DNA
ccaatttcgcccctttgaaagtgggtgg

SEQ ID NO: 2138 - DNA, 28 bp, synthetic construct
  source 1..28: mol_type = other DNA
aagtaaattccacccactttcaaagggg

SEQ ID NO: 2139 - DNA, 28 bp, synthetic construct
  source 1..28: mol_type = other DNA
caagtaaattccacccactttcaaaggg

SEQ ID NO: 2140 - DNA, 28 bp, synthetic construct
  source 1..28: mol_type = other DNA
gcaagtaaattccacccactttcaaagg

SEQ ID NO: 2141 - DNA, 28 bp, synthetic construct
  source 1..28: mol_type = other DNA
gggtggaatttacttgcctctccactgg

SEQ ID NO: 2142 - DNA, 28 bp, synthetic construct
  source 1..28: mol_type = other DNA
ttctcaccaggcccactgtccttcaggg

SEQ ID NO: 2143 - DNA, 28 bp, synthetic construct
  source 1..28: mol_type = other DNA
tttctcaccaggcccactgtccttcagg

SEQ ID NO: 2144 - DNA, 28 bp, synthetic construct
  source 1..28: mol_type = other DNA
tgtgaattaatgcagttttctcaccagg

SEQ ID NO: 2145 - DNA, 28 bp, synthetic construct
  source 1..28: mol_type = other DNA
acaagtggaacagctcggatttctaagg

SEQ ID NO: 2146 - DNA, 28 bp, synthetic construct
  source 1..28: mol_type = other DNA
gtctctgttaacaagtggaacagctcgg

SEQ ID NO: 2147 - DNA, 28 bp, synthetic construct
  source 1..28: mol_type = other DNA
agctgttccacttgttaacagagaccgg

SEQ ID NO: 2148 - DNA, 28 bp, synthetic construct
  source 1..28: mol_type = other DNA
gctgttccacttgttaacagagaccggg

SEQ ID NO: 2149 - DNA, 28 bp, synthetic construct
  source 1..28: mol_type = other DNA
ctgttccacttgttaacagagaccgggg

SEQ ID NO: 2150 - DNA, 28 bp, synthetic construct
  source 1..28: mol_type = other DNA
atcttccccggtctctgttaacaagtgg

SEQ ID NO: 2151 - DNA, 28 bp, synthetic construct
  source 1..28: mol_type = other DNA
aacttttaagtcttcaaatcttccccgg

SEQ ID NO: 2152 - DNA, 28 bp, synthetic construct
  source 1..28: mol_type = other DNA
ttgacagatcctgaaaatgagatgaagg

SEQ ID NO: 2153 - DNA, 28 bp, synthetic construct
  source 1..28: mol_type = other DNA
aaatccccgtccaaggctgggaccatgg

SEQ ID NO: 2154 - DNA, 28 bp, synthetic construct
  source 1..28: mol_type = other DNA
tgtgccatggtcccagccttggacgggg

SEQ ID NO: 2155 - DNA, 28 bp, synthetic construct
  source 1..28: mol_type = other DNA
ttgtgccatggtcccagccttggacggg

SEQ ID NO: 2156 - DNA, 28 bp, synthetic construct
  source 1..28: mol_type = other DNA
gttgtgccatggtcccagccttggacgg

SEQ ID NO: 2157 - DNA, 28 bp, synthetic construct
  source 1..28: mol_type = other DNA
atgagttgtgccatggtcccagccttgg

SEQ ID NO: 2158 - DNA, 28 bp, synthetic construct
  source 1..28: mol_type = other DNA
ggcattgatgagatgagttgtgccatgg

SEQ ID NO: 2159 - DNA, 28 bp, synthetic construct
  source 1..28: mol_type = other DNA
agctgaacataaactgcttactttgcgg

SEQ ID NO: 2160 - DNA, 28 bp, synthetic construct
  source 1..28: mol_type = other DNA
tacatattttttccttttggtcttcagg

SEQ ID NO: 2161 - DNA, 28 bp, synthetic construct
  source 1..28: mol_type = other DNA
tattttttccttttggtcttcaggttgg

SEQ ID NO: 2162 - DNA, 28 bp, synthetic construct
  source 1..28: mol_type = other DNA
agcttcatccaacctgaagaccaaaagg

SEQ ID NO: 2163 - DNA, 28 bp, synthetic construct
  source 1..28: mol_type = other DNA
aatcatctaccagattgatttcttttgg

SEQ ID NO: 2164 - DNA, 28 bp, synthetic construct
  source 1..28: mol_type = other DNA
gaaaacagcgagcaggggaggagagagg

SEQ ID NO: 2165 - DNA, 28 bp, synthetic construct
  source 1..28: mol_type = other DNA
aaaacagcgagcaggggaggagagaggg

SEQ ID NO: 2166 - DNA, 28 bp, synthetic construct
  source 1..28: mol_type = other DNA
aaacagcgagcaggggaggagagagggg

SEQ ID NO: 2167 - DNA, 28 bp, synthetic construct
  source 1..28: mol_type = other DNA
agagaggggcacgcccagaatcccatgg

SEQ ID NO: 2168 - DNA, 28 bp, synthetic construct
  source 1..28: mol_type = other DNA
attttacatccatgagagaaagctgggg

SEQ ID NO: 2169 - DNA, 28 bp, synthetic construct
  source 1..28: mol_type = other DNA
cattttacatccatgagagaaagctggg

SEQ ID NO: 2170 - DNA, 28 bp, synthetic construct
  source 1..28: mol_type = other DNA
acattttacatccatgagagaaagctgg

SEQ ID NO: 2171 - DNA, 28 bp, synthetic construct
  source 1..28: mol_type = other DNA
tcacagacatgaagaaggggcagttggg

SEQ ID NO: 2172 - DNA, 28 bp, synthetic construct
  source 1..28: mol_type = other DNA
ttcacagacatgaagaaggggcagttgg

SEQ ID NO: 2173 - DNA, 28 bp, synthetic construct
  source 1..28: mol_type = other DNA
ctgggtgttcacagacatgaagaagggg

SEQ ID NO: 2174 - DNA, 28 bp, synthetic construct
  source 1..28: mol_type = other DNA
gctgggtgttcacagacatgaagaaggg

SEQ ID NO: 2175 - DNA, 28 bp, synthetic construct
  source 1..28: mol_type = other DNA
ggctgggtgttcacagacatgaagaagg

SEQ ID NO: 2176 - DNA, 28 bp, synthetic construct
  source 1..28: mol_type = other DNA
cttttgccgcctctctgagcactcatgg

SEQ ID NO: 2177 - DNA, 28 bp, synthetic construct
  source 1..28: mol_type = other DNA
cagtgagaccactgccatgaagtgcagg

SEQ ID NO: 2178 - DNA, 28 bp, synthetic construct
  source 1..28: mol_type = other DNA
ccactgccatgaagtgcaggagccccgg

SEQ ID NO: 2179 - DNA, 28 bp, synthetic construct
  source 1..28: mol_type = other DNA
gggcagccggggctcctgcacttcatgg

SEQ ID NO: 2180 - DNA, 28 bp, synthetic construct
  source 1..28: mol_type = other DNA
attttgtgaacgttgccacaacgcccgg

SEQ ID NO: 2181 - DNA, 28 bp, synthetic construct
  source 1..28: mol_type = other DNA
gctggcgtgaagttgccgggcgttgtgg

SEQ ID NO: 2182 - DNA, 28 bp, synthetic construct
  source 1..28: mol_type = other DNA
ccaagcctgcctccaggatgttaccagg

SEQ ID NO: 2183 - DNA, 28 bp, synthetic construct
  source 1..28: mol_type = other DNA
aatgtcctggtaacatcctggaggcagg

SEQ ID NO: 2184 - DNA, 28 bp, synthetic construct
  source 1..28: mol_type = other DNA
attaaatgtcctggtaacatcctggagg

SEQ ID NO: 2185 - DNA, 28 bp, synthetic construct
  source 1..28: mol_type = other DNA
tccaggatgttaccaggacatttaatgg

SEQ ID NO: 2186 - DNA, 28 bp, synthetic construct
  source 1..28: mol_type = other DNA
ccaggatgttaccaggacatttaatggg

SEQ ID NO: 2187 - DNA, 28 bp, synthetic construct
  source 1..28: mol_type = other DNA
gtactgcagatcccattaaatgtcctgg

SEQ ID NO: 2188 - DNA, 28 bp, synthetic construct
  source 1..28: mol_type = other DNA
tgggatctgcagtacttgcttcaaaagg

SEQ ID NO: 2189 - DNA, 28 bp, synthetic construct
  source 1..28: mol_type = other DNA
acttgcttcaaaaggactacagcagagg

SEQ ID NO: 2190 - DNA, 28 bp, synthetic construct
  source 1..28: mol_type = other DNA
gggaggctggtgctgaggctggaggagg

SEQ ID NO: 2191 - DNA, 28 bp, synthetic construct
  source 1..28: mol_type = other DNA
ggagggaggctggtgctgaggctggagg

SEQ ID NO: 2192 - DNA, 28 bp, synthetic construct
  source 1..28: mol_type = other DNA
gaaggagggaggctggtgctgaggctgg

SEQ ID NO: 2193 - DNA, 28 bp, synthetic construct
  source 1..28: mol_type = other DNA
acaggaaggagggaggctggtgctgagg

SEQ ID NO: 2194 - DNA, 28 bp, synthetic construct
  source 1..28: mol_type = other DNA
cgctggtgacaggaaggagggaggctgg

SEQ ID NO: 2195 - DNA, 28 bp, synthetic construct
  source 1..28: mol_type = other DNA
ggaacgctggtgacaggaaggagggagg

SEQ ID NO: 2196 - DNA, 28 bp, synthetic construct
  source 1..28: mol_type = other DNA
cttggaacgctggtgacaggaaggaggg

SEQ ID NO: 2197 - DNA, 28 bp, synthetic construct
  source 1..28: mol_type = other DNA
acttggaacgctggtgacaggaaggagg

SEQ ID NO: 2198 - DNA, 28 bp, synthetic construct
  source 1..28: mol_type = other DNA
ctgacttggaacgctggtgacaggaagg

SEQ ID NO: 2199 - DNA, 28 bp, synthetic construct
  source 1..28: mol_type = other DNA
ggatctgacttggaacgctggtgacagg

SEQ ID NO: 2200 - DNA, 28 bp, synthetic construct
  source 1..28: mol_type = other DNA
ccagcgttccaagtcagatccctcgcgg

SEQ ID NO: 2201 - DNA, 28 bp, synthetic construct
  source 1..28: mol_type = other DNA
cggacgagccgcgagggatctgacttgg

SEQ ID NO: 2202 - DNA, 28 bp, synthetic construct
  source 1..28: mol_type = other DNA
caagtcagatccctcgcggctcgtccgg

SEQ ID NO: 2203 - DNA, 28 bp, synthetic construct
  source 1..28: mol_type = other DNA
gggaggggctccggacgagccgcgaggg

SEQ ID NO: 2204 - DNA, 28 bp, synthetic construct
  source 1..28: mol_type = other DNA
ggggaggggctccggacgagccgcgagg

SEQ ID NO: 2205 - DNA, 28 bp, synthetic construct
  source 1..28: mol_type = other DNA
gtggcaagaatgcggggaggggctccgg

SEQ ID NO: 2206 - DNA, 28 bp, synthetic construct
  source 1..28: mol_type = other DNA
agctctgtggcaagaatgcggggagggg

SEQ ID NO: 2207 - DNA, 28 bp, synthetic construct
  source 1..28: mol_type = other DNA
cagctctgtggcaagaatgcggggaggg

SEQ ID NO: 2208 - DNA, 28 bp, synthetic construct
  source 1..28: mol_type = other DNA
cctccccgcattcttgccacagagctgg

SEQ ID NO: 2209 - DNA, 28 bp, synthetic construct
  source 1..28: mol_type = other DNA
tttccagctctgtggcaagaatgcgggg

SEQ ID NO: 2210 - DNA, 28 bp, synthetic construct
  source 1..28: mol_type = other DNA
gtttccagctctgtggcaagaatgcggg

SEQ ID NO: 2211 - DNA, 28 bp, synthetic construct
  source 1..28: mol_type = other DNA
cgtttccagctctgtggcaagaatgcgg

SEQ ID NO: 2212 - DNA, 28 bp, synthetic construct
  source 1..28: mol_type = other DNA
agcaggggcgtcgtttccagctctgtgg

SEQ ID NO: 2213 - DNA, 28 bp, synthetic construct
  source 1..28: mol_type = other DNA
acagagctggaaacgacgcccctgctgg

SEQ ID NO: 2214 - DNA, 28 bp, synthetic construct
  source 1..28: mol_type = other DNA
gcagcttgagacaggcagccagcagggg

SEQ ID NO: 2215 - DNA, 28 bp, synthetic construct
  source 1..28: mol_type = other DNA
tgcagcttgagacaggcagccagcaggg

SEQ ID NO: 2216 - DNA, 28 bp, synthetic construct
  source 1..28: mol_type = other DNA
gtgcagcttgagacaggcagccagcagg

SEQ ID NO: 2217 - DNA, 28 bp, synthetic construct
  source 1..28: mol_type = other DNA
tgctggctgcctgtctcaagctgcacgg

SEQ ID NO: 2218 - DNA, 28 bp, synthetic construct
  source 1..28: mol_type = other DNA
gcctgtctcaagctgcacggactcctgg

SEQ ID NO: 2219 - DNA, 28 bp, synthetic construct
  source 1..28: mol_type = other DNA
cctgtctcaagctgcacggactcctggg

SEQ ID NO: 2220 - DNA, 28 bp, synthetic construct
  source 1..28: mol_type = other DNA
ctgtctcaagctgcacggactcctgggg

SEQ ID NO: 2221 - DNA, 28 bp, synthetic construct
  source 1..28: mol_type = other DNA
tcaagctgcacggactcctggggacagg

SEQ ID NO: 2222 - DNA, 28 bp, synthetic construct
  source 1..28: mol_type = other DNA
gctgcacggactcctggggacaggacgg

SEQ ID NO: 2223 - DNA, 28 bp, synthetic construct
  source 1..28: mol_type = other DNA
ctgcacggactcctggggacaggacggg

SEQ ID NO: 2224 - DNA, 28 bp, synthetic construct
  source 1..28: mol_type = other DNA
tgcacggactcctggggacaggacgggg

SEQ ID NO: 2225 - DNA, 28 bp, synthetic construct
  source 1..28: mol_type = other DNA
acttgctcgtccccgtcctgtccccagg

SEQ ID NO: 2226 - DNA, 28 bp, synthetic construct
  source 1..28: mol_type = other DNA
tctggagtcccaaaatacacgcagccgg

SEQ ID NO: 2227 - DNA, 28 bp, synthetic construct
  source 1..28: mol_type = other DNA
gtgtattttgggactccagaaaacaagg

SEQ ID NO: 2228 - DNA, 28 bp, synthetic construct
  source 1..28: mol_type = other DNA
tgtattttgggactccagaaaacaaggg

SEQ ID NO: 2229 - DNA, 28 bp, synthetic construct
  source 1..28: mol_type = other DNA
acagtgtgcaaaagcccttgttttctgg

SEQ ID NO: 2230 - DNA, 28 bp, synthetic construct
  source 1..28: mol_type = other DNA
acagagaaaacaaacgtgagtgaagtgg

SEQ ID NO: 2231 - DNA, 28 bp, synthetic construct
  source 1..28: mol_type = other DNA
ggcagcagcaaaatctacatgagaatgg

SEQ ID NO: 2232 - DNA, 28 bp, synthetic construct
  source 1..28: mol_type = other DNA
ctcatgtagattttgctgctgcctcagg

SEQ ID NO: 2233 - DNA, 28 bp, synthetic construct
  source 1..28: mol_type = other DNA
tcatgtagattttgctgctgcctcaggg

SEQ ID NO: 2234 - DNA, 28 bp, synthetic construct
  source 1..28: mol_type = other DNA
gcctggggagggaatgcggcacccttgg

SEQ ID NO: 2235 - DNA, 28 bp, synthetic construct
  source 1..28: mol_type = other DNA
tccaagggtgccgcattccctccccagg

SEQ ID NO: 2236 - DNA, 28 bp, synthetic construct
  source 1..28: mol_type = other DNA
gcacccttggaagcaccatgtttgaagg

SEQ ID NO: 2237 - DNA, 28 bp, synthetic construct
  source 1..28: mol_type = other DNA
tatccttcaaacatggtgcttccaaggg

SEQ ID NO: 2238 - DNA, 28 bp, synthetic construct
  source 1..28: mol_type = other DNA
gtatccttcaaacatggtgcttccaagg

SEQ ID NO: 2239 - DNA, 28 bp, synthetic construct
  source 1..28: mol_type = other DNA
cacttctggcagtatccttcaaacatgg

SEQ ID NO: 2240 - DNA, 28 bp, synthetic construct
  source 1..28: mol_type = other DNA
attctgagcttcaatgaaacacttctgg

SEQ ID NO: 2241 - DNA, 28 bp, synthetic construct
  source 1..28: mol_type = other DNA
gaagctcagaatcagagatttcatgagg

SEQ ID NO: 2242 - DNA, 28 bp, synthetic construct
  source 1..28: mol_type = other DNA
gaatcagagatttcatgaggccaaaagg

SEQ ID NO: 2243 - DNA, 28 bp, synthetic construct
  source 1..28: mol_type = other DNA
gaggccaaaaggacagaagagcaactgg

SEQ ID NO: 2244 - DNA, 28 bp, synthetic construct
  source 1..28: mol_type = other DNA
ctcaccagttgctcttctgtccttttgg

SEQ ID NO: 2245 - DNA, 28 bp, synthetic construct
  source 1..28: mol_type = other DNA
acagaagagcaactggtgagacacttgg

SEQ ID NO: 2246 - DNA, 28 bp, synthetic construct
  source 1..28: mol_type = other DNA
gaagagcaactggtgagacacttggagg

SEQ ID NO: 2247 - DNA, 28 bp, synthetic construct
  source 1..28: mol_type = other DNA
ggctcgatctctgagtggaaagaacagg

SEQ ID NO: 2248 - DNA, 28 bp, synthetic construct
  source 1..28: mol_type = other DNA
tctctgcgctggctcgatctctgagtgg

SEQ ID NO: 2249 - DNA, 28 bp, synthetic construct
  source 1..28: mol_type = other DNA
tgtggttcgaggcacatctctgcgctgg

SEQ ID NO: 2250 - DNA, 28 bp, synthetic construct
  source 1..28: mol_type = other DNA
gcctcgaaccacacaaagcacctcaagg

SEQ ID NO: 2251 - DNA, 28 bp, synthetic construct
  source 1..28: mol_type = other DNA
gccttgaggtgctttgtgtggttcgagg

SEQ ID NO: 2252 - DNA, 28 bp, synthetic construct
  source 1..28: mol_type = other DNA
cacttgggccttgaggtgctttgtgtgg

SEQ ID NO: 2253 - DNA, 28 bp, synthetic construct
  source 1..28: mol_type = other DNA
aagcacctcaaggcccaagtgcgcccgg

SEQ ID NO: 2254 - DNA, 28 bp, synthetic construct
  source 1..28: mol_type = other DNA
agcacctcaaggcccaagtgcgcccggg

SEQ ID NO: 2255 - DNA, 28 bp, synthetic construct
  source 1..28: mol_type = other DNA
gaggcccgggcgcacttgggccttgagg

SEQ ID NO: 2256 - DNA, 28 bp, synthetic construct
  source 1..28: mol_type = other DNA
tcttgcaggaggcccgggcgcacttggg

SEQ ID NO: 2257 - DNA, 28 bp, synthetic construct
  source 1..28: mol_type = other DNA
ttcttgcaggaggcccgggcgcacttgg

SEQ ID NO: 2258 - DNA, 28 bp, synthetic construct
  source 1..28: mol_type = other DNA
gcccgggcctcctgcaagaacatcctgg

SEQ ID NO: 2259 - DNA, 28 bp, synthetic construct
  source 1..28: mol_type = other DNA
gccaggatgttcttgcaggaggcccggg

SEQ ID NO: 2260 - DNA, 28 bp, synthetic construct
  source 1..28: mol_type = other DNA
ggccaggatgttcttgcaggaggcccgg

SEQ ID NO: 2261 - DNA, 28 bp, synthetic construct
  source 1..28: mol_type = other DNA
cggcaggccaggatgttcttgcaggagg

SEQ ID NO: 2262 - DNA, 28 bp, synthetic construct
  source 1..28: mol_type = other DNA
ctgcggcaggccaggatgttcttgcagg

SEQ ID NO: 2263 - DNA, 28 bp, synthetic construct
  source 1..28: mol_type = other DNA
aagaacatcctggcctgccgcagcgagg

SEQ ID NO: 2264 - DNA, 28 bp, synthetic construct
  source 1..28: mol_type = other DNA
gcagagctcctcgctgcggcaggccagg

SEQ ID NO: 2265 - DNA, 28 bp, synthetic construct
  source 1..28: mol_type = other DNA
gcctgccgcagcgaggagctctgcatgg

SEQ ID NO: 2266 - DNA, 28 bp, synthetic construct
  source 1..28: mol_type = other DNA
tccatgcagagctcctcgctgcggcagg

SEQ ID NO: 2267 - DNA, 28 bp, synthetic construct
  source 1..28: mol_type = other DNA
acactccatgcagagctcctcgctgcgg

SEQ ID NO: 2268 - DNA, 28 bp, synthetic construct
  source 1..28: mol_type = other DNA
catggagtgtcagcatcccaaccagagg

SEQ ID NO: 2269 - DNA, 28 bp, synthetic construct
  source 1..28: mol_type = other DNA
gagtgtcagcatcccaaccagaggatgg

SEQ ID NO: 2270 - DNA, 28 bp, synthetic construct
  source 1..28: mol_type = other DNA
agtgtcagcatcccaaccagaggatggg

SEQ ID NO: 2271 - DNA, 28 bp, synthetic construct
  source 1..28: mol_type = other DNA
agcatcccaaccagaggatgggccctgg

SEQ ID NO: 2272 - DNA, 28 bp, synthetic construct
  source 1..28: mol_type = other DNA
gcatcccaaccagaggatgggccctggg

SEQ ID NO: 2273 - DNA, 28 bp, synthetic construct
  source 1..28: mol_type = other DNA
catcccaaccagaggatgggccctgggg

SEQ ID NO: 2274 - DNA, 28 bp, synthetic construct
  source 1..28: mol_type = other DNA
gggccccagggcccatcctctggttggg

SEQ ID NO: 2275 - DNA, 28 bp, synthetic construct
  source 1..28: mol_type = other DNA
tgggccccagggcccatcctctggttgg

SEQ ID NO: 2276 - DNA, 28 bp, synthetic construct
  source 1..28: mol_type = other DNA
ccagaggatgggccctggggcccaccgg

SEQ ID NO: 2277 - DNA, 28 bp, synthetic construct
  source 1..28: mol_type = other DNA
cagaggatgggccctggggcccaccggg

SEQ ID NO: 2278 - DNA, 28 bp, synthetic construct
  source 1..28: mol_type = other DNA
agaggatgggccctggggcccaccgggg

SEQ ID NO: 2279 - DNA, 28 bp, synthetic construct
  source 1..28: mol_type = other DNA
ggcaggctcaccccggtgggccccaggg

SEQ ID NO: 2280 - DNA, 28 bp, synthetic construct
  source 1..28: mol_type = other DNA
gggcaggctcaccccggtgggccccagg

SEQ ID NO: 2281 - DNA, 28 bp, synthetic construct
  source 1..28: mol_type = other DNA
tcttcgggggcaggctcaccccggtggg

SEQ ID NO: 2282 - DNA, 28 bp, synthetic construct
  source 1..28: mol_type = other DNA
gtcttcgggggcaggctcaccccggtgg

SEQ ID NO: 2283 - DNA, 28 bp, synthetic construct
  source 1..28: mol_type = other DNA
ggggtcttcgggggcaggctcaccccgg

SEQ ID NO: 2284 - DNA, 28 bp, synthetic construct
  source 1..28: mol_type = other DNA
gctgcttgggggggtcttcgggggcagg

SEQ ID NO: 2285 - DNA, 28 bp, synthetic construct
  source 1..28: mol_type = other DNA
caacgctgcttgggggggtcttcggggg

SEQ ID NO: 2286 - DNA, 28 bp, synthetic construct
  source 1..28: mol_type = other DNA
gcaacgctgcttgggggggtcttcgggg

SEQ ID NO: 2287 - DNA, 28 bp, synthetic construct
  source 1..28: mol_type = other DNA
ggcaacgctgcttgggggggtcttcggg

SEQ ID NO: 2288 - DNA, 28 bp, synthetic construct
  source 1..28: mol_type = other DNA
cggcaacgctgcttgggggggtcttcgg

SEQ ID NO: 2289 - DNA, 28 bp, synthetic construct
  source 1..28: mol_type = other DNA
cgaagacccccccaagcagcgttgccgg

SEQ ID NO: 2290 - DNA, 28 bp, synthetic construct
  source 1..28: mol_type = other DNA
gaagacccccccaagcagcgttgccggg

SEQ ID NO: 2291 - DNA, 28 bp, synthetic construct
  source 1..28: mol_type = other DNA
gggggcccggcaacgctgcttggggggg

SEQ ID NO: 2292 - DNA, 28 bp, synthetic construct
  source 1..28: mol_type = other DNA
cgggggcccggcaacgctgcttgggggg

SEQ ID NO: 2293 - DNA, 28 bp, synthetic construct
  source 1..28: mol_type = other DNA
gcgggggcccggcaacgctgcttggggg

SEQ ID NO: 2294 - DNA, 28 bp, synthetic construct
  source 1..28: mol_type = other DNA
ggcgggggcccggcaacgctgcttgggg

SEQ ID NO: 2295 - DNA, 28 bp, synthetic construct
  source 1..28: mol_type = other DNA
aggcgggggcccggcaacgctgcttggg

SEQ ID NO: 2296 - DNA, 28 bp, synthetic construct
  source 1..28: mol_type = other DNA
caggcgggggcccggcaacgctgcttgg

SEQ ID NO: 2297 - DNA, 28 bp, synthetic construct
  source 1..28: mol_type = other DNA
gccgggcccccgcctgtgatcattttgg

SEQ ID NO: 2298 - DNA, 28 bp, synthetic construct
  source 1..28: mol_type = other DNA
gccaaaatgatcacaggcgggggcccgg

SEQ ID NO: 2299 - DNA, 28 bp, synthetic construct
  source 1..28: mol_type = other DNA
gcattgccaaaatgatcacaggcggggg

SEQ ID NO: 2300 - DNA, 28 bp, synthetic construct
  source 1..28: mol_type = other DNA
ggcattgccaaaatgatcacaggcgggg

SEQ ID NO: 2301 - DNA, 28 bp, synthetic construct
  source 1..28: mol_type = other DNA
tggcattgccaaaatgatcacaggcggg

SEQ ID NO: 2302 - DNA, 28 bp, synthetic construct
  source 1..28: mol_type = other DNA
ttggcattgccaaaatgatcacaggcgg

SEQ ID NO: 2303 - DNA, 28 bp, synthetic construct
  source 1..28: mol_type = other DNA
cacttggcattgccaaaatgatcacagg

SEQ ID NO: 2304 - DNA, 28 bp, synthetic construct
  source 1..28: mol_type = other DNA
atcattttggcaatgccaagtgcaacgg

SEQ ID NO: 2305 - DNA, 28 bp, synthetic construct
  source 1..28: mol_type = other DNA
cattcgttgcagtagccgttgcacttgg

SEQ ID NO: 2306 - DNA, 28 bp, synthetic construct
  source 1..28: mol_type = other DNA
aatgctttcagttcaagcagatgtatgg

SEQ ID NO: 2307 - DNA, 28 bp, synthetic construct
  source 1..28: mol_type = other DNA
cagttcaagcagatgtatggctaaccgg

SEQ ID NO: 2308 - DNA, 28 bp, synthetic construct
  source 1..28: mol_type = other DNA
agcagatgtatggctaaccggaaacagg

SEQ ID NO: 2309 - DNA, 28 bp, synthetic construct
  source 1..28: mol_type = other DNA
agatgtatggctaaccggaaacaggtgg

SEQ ID NO: 2310 - DNA, 28 bp, synthetic construct
  source 1..28: mol_type = other DNA
gatgtatggctaaccggaaacaggtggg

SEQ ID NO: 2311 - DNA, 28 bp, synthetic construct
  source 1..28: mol_type = other DNA
ttgcaggaggtgacccacctgtttccgg

SEQ ID NO: 2312 - DNA, 28 bp, synthetic construct
  source 1..28: mol_type = other DNA
caggtgggtcacctcctgcaagaagtgg

SEQ ID NO: 2313 - DNA, 28 bp, synthetic construct
  source 1..28: mol_type = other DNA
aggtgggtcacctcctgcaagaagtggg

SEQ ID NO: 2314 - DNA, 28 bp, synthetic construct
  source 1..28: mol_type = other DNA
ggtgggtcacctcctgcaagaagtgggg

SEQ ID NO: 2315 - DNA, 28 bp, synthetic construct
  source 1..28: mol_type = other DNA
agctcgaggccccacttcttgcaggagg

SEQ ID NO: 2316 - DNA, 28 bp, synthetic construct
  source 1..28: mol_type = other DNA
gacagctcgaggccccacttcttgcagg

SEQ ID NO: 2317 - DNA, 28 bp, synthetic construct
  source 1..28: mol_type = other DNA
tggggcctcgagctgtcagtcatcatgg

SEQ ID NO: 2318 - DNA, 28 bp, synthetic construct
  source 1..28: mol_type = other DNA
tagcaccatgatgactgacagctcgagg

SEQ ID NO: 2319 - DNA, 28 bp, synthetic construct
  source 1..28: mol_type = other DNA
ttgcagtggcagctgaggggttcagagg

SEQ ID NO: 2320 - DNA, 28 bp, synthetic construct
  source 1..28: mol_type = other DNA
aacccctcagctgccactgcaacagtgg

SEQ ID NO: 2321 - DNA, 28 bp, synthetic construct
  source 1..28: mol_type = other DNA
acccctcagctgccactgcaacagtggg

SEQ ID NO: 2322 - DNA, 28 bp, synthetic construct
  source 1..28: mol_type = other DNA
gcccactgttgcagtggcagctgagggg

SEQ ID NO: 2323 - DNA, 28 bp, synthetic construct
  source 1..28: mol_type = other DNA
agcccactgttgcagtggcagctgaggg

SEQ ID NO: 2324 - DNA, 28 bp, synthetic construct
  source 1..28: mol_type = other DNA
aagcccactgttgcagtggcagctgagg

SEQ ID NO: 2325 - DNA, 28 bp, synthetic construct
  source 1..28: mol_type = other DNA
agctgccactgcaacagtgggcttaagg

SEQ ID NO: 2326 - DNA, 28 bp, synthetic construct
  source 1..28: mol_type = other DNA
gctgccactgcaacagtgggcttaaggg

SEQ ID NO: 2327 - DNA, 28 bp, synthetic construct
  source 1..28: mol_type = other DNA
gacacccttaagcccactgttgcagtgg

SEQ ID NO: 2328 - DNA, 28 bp, synthetic construct
  source 1..28: mol_type = other DNA
acagtgggcttaagggtgtctgagcagg

SEQ ID NO: 2329 - DNA, 28 bp, synthetic construct
  source 1..28: mol_type = other DNA
gggcttaagggtgtctgagcaggagagg

SEQ ID NO: 2330 - DNA, 28 bp, synthetic construct
  source 1..28: mol_type = other DNA
caggagaggaaagataagctcttcgtgg

SEQ ID NO: 2331 - DNA, 28 bp, synthetic construct
  source 1..28: mol_type = other DNA
gctcttcgtggtgcccacgatgctcagg

SEQ ID NO: 2332 - DNA, 28 bp, synthetic construct
  source 1..28: mol_type = other DNA
tcgtggtgcccacgatgctcaggtttgg

SEQ ID NO: 2333 - DNA, 28 bp, synthetic construct
  source 1..28: mol_type = other DNA
cccacgatgctcaggtttggtaacccgg

SEQ ID NO: 2334 - DNA, 28 bp, synthetic construct
  source 1..28: mol_type = other DNA
ccacgatgctcaggtttggtaacccggg

SEQ ID NO: 2335 - DNA, 28 bp, synthetic construct
  source 1..28: mol_type = other DNA
ggtttggtaacccgggagtgttcccagg

SEQ ID NO: 2336 - DNA, 28 bp, synthetic construct
  source 1..28: mol_type = other DNA
ttggtaacccgggagtgttcccaggtgg

SEQ ID NO: 2337 - DNA, 28 bp, synthetic construct
  source 1..28: mol_type = other DNA
tctaaggccacctgggaacactcccggg

SEQ ID NO: 2338 - DNA, 28 bp, synthetic construct
  source 1..28: mol_type = other DNA
ttctaaggccacctgggaacactcccgg

SEQ ID NO: 2339 - DNA, 28 bp, synthetic construct
  source 1..28: mol_type = other DNA
caagctttgctttctaaggccacctggg

SEQ ID NO: 2340 - DNA, 28 bp, synthetic construct
  source 1..28: mol_type = other DNA
acaagctttgctttctaaggccacctgg

SEQ ID NO: 2341 - DNA, 28 bp, synthetic construct
  source 1..28: mol_type = other DNA
ggccttagaaagcaaagcttgtaactgg

SEQ ID NO: 2342 - DNA, 28 bp, synthetic construct
  source 1..28: mol_type = other DNA
tgccagttacaagctttgctttctaagg

SEQ ID NO: 2343 - DNA, 28 bp, synthetic construct
  source 1..28: mol_type = other DNA
tagaaagcaaagcttgtaactggcaagg

SEQ ID NO: 2344 - DNA, 28 bp, synthetic construct
  source 1..28: mol_type = other DNA
agaaagcaaagcttgtaactggcaaggg

SEQ ID NO: 2345 - DNA, 28 bp, synthetic construct
  source 1..28: mol_type = other DNA
aagggatgatgtcagattcagcccaagg

SEQ ID NO: 2346 - DNA, 28 bp, synthetic construct
  source 1..28: mol_type = other DNA
tgcttggtaggagaggaggaaccttggg

SEQ ID NO: 2347 - DNA, 28 bp, synthetic construct
  source 1..28: mol_type = other DNA
ctgcttggtaggagaggaggaaccttgg

SEQ ID NO: 2348 - DNA, 28 bp, synthetic construct
  source 1..28: mol_type = other DNA
caaggttcctcctctcctaccaagcagg

SEQ ID NO: 2349 - DNA, 28 bp, synthetic construct
  source 1..28: mol_type = other DNA
ggttcctcctctcctaccaagcaggagg

SEQ ID NO: 2350 - DNA, 28 bp, synthetic construct
  source 1..28: mol_type = other DNA
ctggcctcctgcttggtaggagaggagg

SEQ ID NO: 2351 - DNA, 28 bp, synthetic construct
  source 1..28: mol_type = other DNA
ctcctctcctaccaagcaggaggccagg

SEQ ID NO: 2352 - DNA, 28 bp, synthetic construct
  source 1..28: mol_type = other DNA
ttcctggcctcctgcttggtaggagagg

SEQ ID NO: 2353 - DNA, 28 bp, synthetic construct
  source 1..28: mol_type = other DNA
agaagttcctggcctcctgcttggtagg

SEQ ID NO: 2354 - DNA, 28 bp, synthetic construct
  source 1..28: mol_type = other DNA
ccaagcaggaggccaggaacttctttgg

SEQ ID NO: 2355 - DNA, 28 bp, synthetic construct
  source 1..28: mol_type = other DNA
aggaggccaggaacttctttggacttgg

SEQ ID NO: 2356 - DNA, 28 bp, synthetic construct
  source 1..28: mol_type = other DNA
ggccaggaacttctttggacttggaagg

SEQ ID NO: 2357 - DNA, 28 bp, synthetic construct
  source 1..28: mol_type = other DNA
caccttccaagtccaaagaagttcctgg

SEQ ID NO: 2358 - DNA, 28 bp, synthetic construct
  source 1..28: mol_type = other DNA
aacttctttggacttggaaggtgtgcgg

SEQ ID NO: 2359 - DNA, 28 bp, synthetic construct
  source 1..28: mol_type = other DNA
acttctttggacttggaaggtgtgcggg

SEQ ID NO: 2360 - DNA, 28 bp, synthetic construct
  source 1..28: mol_type = other DNA
cttctttggacttggaaggtgtgcgggg

SEQ ID NO: 2361 - DNA, 28 bp, synthetic construct
  source 1..28: mol_type = other DNA
ttggacttggaaggtgtgcggggactgg

SEQ ID NO: 2362 - DNA, 28 bp, synthetic construct
  source 1..28: mol_type = other DNA
ttggaaggtgtgcggggactggccgagg

SEQ ID NO: 2363 - DNA, 28 bp, synthetic construct
  source 1..28: mol_type = other DNA
ccgaggcccctgcaccctgcgcatcagg

SEQ ID NO: 2364 - DNA, 28 bp, synthetic construct
  source 1..28: mol_type = other DNA
agcagtcctgatgcgcagggtgcagggg

SEQ ID NO: 2365 - DNA, 28 bp, synthetic construct
  source 1..28: mol_type = other DNA
aagcagtcctgatgcgcagggtgcaggg

SEQ ID NO: 2366 - DNA, 28 bp, synthetic construct
  source 1..28: mol_type = other DNA
gaagcagtcctgatgcgcagggtgcagg

SEQ ID NO: 2367 - DNA, 28 bp, synthetic construct
  source 1..28: mol_type = other DNA
gacgatgaagcagtcctgatgcgcaggg

SEQ ID NO: 2368 - DNA, 28 bp, synthetic construct
  source 1..28: mol_type = other DNA
agacgatgaagcagtcctgatgcgcagg

SEQ ID NO: 2369 - DNA, 28 bp, synthetic construct
  source 1..28: mol_type = other DNA
gcgcatcaggactgcttcatcgtcttgg

SEQ ID NO: 2370 - DNA, 28 bp, synthetic construct
  source 1..28: mol_type = other DNA
actgcttcatcgtcttggctgagaaagg

SEQ ID NO: 2371 - DNA, 28 bp, synthetic construct
  source 1..28: mol_type = other DNA
ctgcttcatcgtcttggctgagaaaggg

SEQ ID NO: 2372 - DNA, 28 bp, synthetic construct
  source 1..28: mol_type = other DNA
aaagggaaaagacacacaagtcgcgtgg

SEQ ID NO: 2373 - DNA, 28 bp, synthetic construct
  source 1..28: mol_type = other DNA
aagggaaaagacacacaagtcgcgtggg

SEQ ID NO: 2374 - DNA, 28 bp, synthetic construct
  source 1..28: mol_type = other DNA
gaaaagacacacaagtcgcgtgggttgg

SEQ ID NO: 2375 - DNA, 28 bp, synthetic construct
  source 1..28: mol_type = other DNA
tgggggaggggaggtggaatggctctgg

SEQ ID NO: 2376 - DNA, 28 bp, synthetic construct
  source 1..28: mol_type = other DNA
agatgctgggggaggggaggtggaatgg

SEQ ID NO: 2377 - DNA, 28 bp, synthetic construct
  source 1..28: mol_type = other DNA
ctgagagatgctgggggaggggaggtgg

SEQ ID NO: 2378 - DNA, 28 bp, synthetic construct
  source 1..28: mol_type = other DNA
tctctgagagatgctgggggaggggagg

SEQ ID NO: 2379 - DNA, 28 bp, synthetic construct
  source 1..28: mol_type = other DNA
acatctctgagagatgctgggggagggg

SEQ ID NO: 2380 - DNA, 28 bp, synthetic construct
  source 1..28: mol_type = other DNA
cacatctctgagagatgctgggggaggg

SEQ ID NO: 2381 - DNA, 28 bp, synthetic construct
  source 1..28: mol_type = other DNA
tcacatctctgagagatgctgggggagg

SEQ ID NO: 2382 - DNA, 28 bp, synthetic construct
  source 1..28: mol_type = other DNA
gcttcacatctctgagagatgctggggg

SEQ ID NO: 2383 - DNA, 28 bp, synthetic construct
  source 1..28: mol_type = other DNA
ggcttcacatctctgagagatgctgggg

SEQ ID NO: 2384 - DNA, 28 bp, synthetic construct
  source 1..28: mol_type = other DNA
tggcttcacatctctgagagatgctggg

SEQ ID NO: 2385 - DNA, 28 bp, synthetic construct
  source 1..28: mol_type = other DNA
ctggcttcacatctctgagagatgctgg

SEQ ID NO: 2386 - DNA, 28 bp, synthetic construct
  source 1..28: mol_type = other DNA
tcagagatgtgaagccagatcctcatgg

SEQ ID NO: 2387 - DNA, 28 bp, synthetic construct
  source 1..28: mol_type = other DNA
gtgaagccagatcctcatggcagcgagg

SEQ ID NO: 2388 - DNA, 28 bp, synthetic construct
  source 1..28: mol_type = other DNA
agagggcctcgctgccatgaggatctgg

SEQ ID NO: 2389 - DNA, 28 bp, synthetic construct
  source 1..28: mol_type = other DNA
tcttgcagagggcctcgctgccatgagg

SEQ ID NO: 2390 - DNA, 28 bp, synthetic construct
  source 1..28: mol_type = other DNA
agcgaggccctctgcaagaagctcaagg

SEQ ID NO: 2391 - DNA, 28 bp, synthetic construct
  source 1..28: mol_type = other DNA
tgagcttccttgagcttcttgcagaggg

SEQ ID NO: 2392 - DNA, 28 bp, synthetic construct
  source 1..28: mol_type = other DNA
ctgagcttccttgagcttcttgcagagg

SEQ ID NO: 2393 - DNA, 28 bp, synthetic construct
  source 1..28: mol_type = other DNA
ctctgcaagaagctcaaggaagctcagg

SEQ ID NO: 2394 - DNA, 28 bp, synthetic construct
  source 1..28: mol_type = other DNA
tctgcaagaagctcaaggaagctcaggg

SEQ ID NO: 2395 - DNA, 28 bp, synthetic construct
  source 1..28: mol_type = other DNA
gaagctcaaggaagctcagggaaaatgg

SEQ ID NO: 2396 - DNA, 28 bp, synthetic construct
  source 1..28: mol_type = other DNA
gtattcagagagtgtttgtagttcatgg

SEQ ID NO: 2397 - DNA, 28 bp, synthetic construct
  source 1..28: mol_type = other DNA
agttcatggtttttccctacctgcccgg

SEQ ID NO: 2398 - DNA, 28 bp, synthetic construct
  source 1..28: mol_type = other DNA
ccctacctgcccggttcctttcctgagg

SEQ ID NO: 2399 - DNA, 28 bp, synthetic construct
  source 1..28: mol_type = other DNA
tcctcaggaaaggaaccgggcaggtagg

SEQ ID NO: 2400 - DNA, 28 bp, synthetic construct
  source 1..28: mol_type = other DNA
cgggtcctcaggaaaggaaccgggcagg

SEQ ID NO: 2401 - DNA, 28 bp, synthetic construct
  source 1..28: mol_type = other DNA
ctgcccggttcctttcctgaggacccgg

SEQ ID NO: 2402 - DNA, 28 bp, synthetic construct
  source 1..28: mol_type = other DNA
ctgccgggtcctcaggaaaggaaccggg

SEQ ID NO: 2403 - DNA, 28 bp, synthetic construct
  source 1..28: mol_type = other DNA
tctgccgggtcctcaggaaaggaaccgg

SEQ ID NO: 2404 - DNA, 28 bp, synthetic construct
  source 1..28: mol_type = other DNA
tgcatttctgccgggtcctcaggaaagg

SEQ ID NO: 2405 - DNA, 28 bp, synthetic construct
  source 1..28: mol_type = other DNA
ggttctgcatttctgccgggtcctcagg

SEQ ID NO: 2406 - DNA, 28 bp, synthetic construct
  source 1..28: mol_type = other DNA
cccggcagaaatgcagaaccatccatgg

SEQ ID NO: 2407 - DNA, 28 bp, synthetic construct
  source 1..28: mol_type = other DNA
tccatggatggttctgcatttctgccgg

SEQ ID NO: 2408 - DNA, 28 bp, synthetic construct
  source 1..28: mol_type = other DNA
gaaccatccatggactgtgattctgagg

SEQ ID NO: 2409 - DNA, 28 bp, synthetic construct
  source 1..28: mol_type = other DNA
cagcctcagaatcacagtccatggatgg

SEQ ID NO: 2410 - DNA, 28 bp, synthetic construct
  source 1..28: mol_type = other DNA
tcagcagcctcagaatcacagtccatgg

SEQ ID NO: 2411 - DNA, 28 bp, synthetic construct
  source 1..28: mol_type = other DNA
cagtaaaatattctaattttttaaaagg

SEQ ID NO: 2412 - DNA, 28 bp, synthetic construct
  source 1..28: mol_type = other DNA
cttttaaaaaattagaatattttactgg

SEQ ID NO: 2413 - DNA, 28 bp, synthetic construct
  source 1..28: mol_type = other DNA
ttttaaaaaattagaatattttactggg

SEQ ID NO: 2414 - DNA, 28 bp, synthetic construct
  source 1..28: mol_type = other DNA
tttactgggaagacgtgtaactctttgg

SEQ ID NO: 2415 - DNA, 28 bp, synthetic construct
  source 1..28: mol_type = other DNA
ttactgggaagacgtgtaactctttggg

SEQ ID NO: 2416 - DNA, 28 bp, synthetic construct
  source 1..28: mol_type = other DNA
cttctaaagaagttagcttgaactgagg

SEQ ID NO: 2417 - DNA, 28 bp, synthetic construct
  source 1..28: mol_type = other DNA
ataatatacccttacattatgtatgagg

SEQ ID NO: 2418 - DNA, 28 bp, synthetic construct
  source 1..28: mol_type = other DNA
taatatacccttacattatgtatgaggg

SEQ ID NO: 2419 - DNA, 28 bp, synthetic construct
  source 1..28: mol_type = other DNA
aaaaaatccctcatacataatgtaaggg

SEQ ID NO: 2420 - DNA, 28 bp, synthetic construct
  source 1..28: mol_type = other DNA
aaaaaaatccctcatacataatgtaagg

SEQ ID NO: 2421 - DNA, 28 bp, synthetic construct
  source 1..28: mol_type = other DNA
tgaaatgctgccctagaagtacaatagg

SEQ ID NO: 2422 - DNA, 28 bp, synthetic construct
  source 1..28: mol_type = other DNA
atgctgccctagaagtacaataggaagg

SEQ ID NO: 2423 - DNA, 28 bp, synthetic construct
  source 1..28: mol_type = other DNA
atttagccttcctattgtacttctaggg

SEQ ID NO: 2424 - DNA, 28 bp, synthetic construct
  source 1..28: mol_type = other DNA
tatttagccttcctattgtacttctagg

SEQ ID NO: 2425 - DNA, 28 bp, synthetic construct
  source 1..28: mol_type = other DNA
ggctaaataataataacctgttttctgg

SEQ ID NO: 2426 - DNA, 28 bp, synthetic construct
  source 1..28: mol_type = other DNA
taataacctgttttctggttgttgttgg

SEQ ID NO: 2427 - DNA, 28 bp, synthetic construct
  source 1..28: mol_type = other DNA
aataacctgttttctggttgttgttggg

SEQ ID NO: 2428 - DNA, 28 bp, synthetic construct
  source 1..28: mol_type = other DNA
ataacctgttttctggttgttgttgggg

SEQ ID NO: 2429 - DNA, 28 bp, synthetic construct
  source 1..28: mol_type = other DNA
catgccccaacaacaaccagaaaacagg

SEQ ID NO: 2430 - DNA, 28 bp, synthetic construct
  source 1..28: mol_type = other DNA
taaactcaaccagctgcctttttaaagg

SEQ ID NO: 2431 - DNA, 28 bp, synthetic construct
  source 1..28: mol_type = other DNA
aaactcaaccagctgcctttttaaaggg

SEQ ID NO: 2432 - DNA, 28 bp, synthetic construct
  source 1..28: mol_type = other DNA
ctagagctccctttaaaaaggcagctgg

SEQ ID NO: 2433 - DNA, 28 bp, synthetic construct
  source 1..28: mol_type = other DNA
aaaaggactagagctccctttaaaaagg

SEQ ID NO: 2434 - DNA, 28 bp, synthetic construct
  source 1..28: mol_type = other DNA
aataaataaagtgaattacacaaaaagg

SEQ ID NO: 2435 - DNA, 28 bp, synthetic construct
  source 1..28: mol_type = other DNA
ttaagtgaagatatttcttcagctctgg

SEQ ID NO: 2436 - DNA, 28 bp, synthetic construct
  source 1..28: mol_type = other DNA
taagtgaagatatttcttcagctctggg

SEQ ID NO: 2437 - DNA, 28 bp, synthetic construct
  source 1..28: mol_type = other DNA
aagtgaagatatttcttcagctctgggg

SEQ ID NO: 2438 - DNA, 28 bp, synthetic construct
  source 1..28: mol_type = other DNA
aggatgttctctcaggagaacactgtgg

SEQ ID NO: 2439 - DNA, 28 bp, synthetic construct
  source 1..28: mol_type = other DNA
tgactcaaagcaaggatgttctctcagg

SEQ ID NO: 2440 - DNA, 28 bp, synthetic construct
  source 1..28: mol_type = other DNA
tgagagaacatccttgctttgagtcagg

SEQ ID NO: 2441 - DNA, 28 bp, synthetic construct
  source 1..28: mol_type = other DNA
aacatccttgctttgagtcaggctgtgg

SEQ ID NO: 2442 - DNA, 28 bp, synthetic construct
  source 1..28: mol_type = other DNA
acatccttgctttgagtcaggctgtggg

SEQ ID NO: 2443 - DNA, 28 bp, synthetic construct
  source 1..28: mol_type = other DNA
cttgcccacagcctgactcaaagcaagg

SEQ ID NO: 2444 - DNA, 28 bp, synthetic construct
  source 1..28: mol_type = other DNA
aggctgtgggcaagttcctgaccacagg

SEQ ID NO: 2445 - DNA, 28 bp, synthetic construct
  source 1..28: mol_type = other DNA
ggctgtgggcaagttcctgaccacaggg

SEQ ID NO: 2446 - DNA, 28 bp, synthetic construct
  source 1..28: mol_type = other DNA
aagttcctgaccacagggagtaaattgg

SEQ ID NO: 2447 - DNA, 28 bp, synthetic construct
  source 1..28: mol_type = other DNA
agaggccaatttactccctgtggtcagg

SEQ ID NO: 2448 - DNA, 28 bp, synthetic construct
  source 1..28: mol_type = other DNA
atcaaagaggccaatttactccctgtgg

SEQ ID NO: 2449 - DNA, 28 bp, synthetic construct
  source 1..28: mol_type = other DNA
ggaggcaagcaaaagtgtatcaaagagg

SEQ ID NO: 2450 - DNA, 28 bp, synthetic construct
  source 1..28: mol_type = other DNA
ttgatacacttttgcttgcctccccagg

SEQ ID NO: 2451 - DNA, 28 bp, synthetic construct
  source 1..28: mol_type = other DNA
cttttgcttgcctccccaggaaagaagg

SEQ ID NO: 2452 - DNA, 28 bp, synthetic construct
  source 1..28: mol_type = other DNA
ggatgcaattccttctttcctggggagg

SEQ ID NO: 2453 - DNA, 28 bp, synthetic construct
  source 1..28: mol_type = other DNA
cttggatgcaattccttctttcctgggg

SEQ ID NO: 2454 - DNA, 28 bp, synthetic construct
  source 1..28: mol_type = other DNA
cccaggaaagaaggaattgcatccaagg

SEQ ID NO: 2455 - DNA, 28 bp, synthetic construct
  source 1..28: mol_type = other DNA
accttggatgcaattccttctttcctgg

SEQ ID NO: 2456 - DNA, 28 bp, synthetic construct
  source 1..28: mol_type = other DNA
catcgatgaatatgtatgtataccttgg

SEQ ID NO: 2457 - DNA, 28 bp, synthetic construct
  source 1..28: mol_type = other DNA
tttattacatagctggagtttcataagg

SEQ ID NO: 2458 - DNA, 28 bp, synthetic construct
  source 1..28: mol_type = other DNA
agagtatagttttttattacatagctgg

SEQ ID NO: 2459 - DNA, 28 bp, synthetic construct
  source 1..28: mol_type = other DNA
aatgcctctgagtgtcctacctccttgg

SEQ ID NO: 2460 - DNA, 28 bp, synthetic construct
  source 1..28: mol_type = other DNA
atctccaaggaggtaggacactcagagg

SEQ ID NO: 2461 - DNA, 28 bp, synthetic construct
  source 1..28: mol_type = other DNA
tgtcctacctccttggagatgagatagg

SEQ ID NO: 2462 - DNA, 28 bp, synthetic construct
  source 1..28: mol_type = other DNA
gtcctacctccttggagatgagataggg

SEQ ID NO: 2463 - DNA, 28 bp, synthetic construct
  source 1..28: mol_type = other DNA
ttccctatctcatctccaaggaggtagg

SEQ ID NO: 2464 - DNA, 28 bp, synthetic construct
  source 1..28: mol_type = other DNA
tacctccttggagatgagatagggaagg

SEQ ID NO: 2465 - DNA, 28 bp, synthetic construct
  source 1..28: mol_type = other DNA
ctccttccctatctcatctccaaggagg

SEQ ID NO: 2466 - DNA, 28 bp, synthetic construct
  source 1..28: mol_type = other DNA
ctgctccttccctatctcatctccaagg

SEQ ID NO: 2467 - DNA, 28 bp, synthetic construct
  source 1..28: mol_type = other DNA
cttggagatgagatagggaaggagcagg

SEQ ID NO: 2468 - DNA, 28 bp, synthetic construct
  source 1..28: mol_type = other DNA
ttggagatgagatagggaaggagcaggg

SEQ ID NO: 2469 - DNA, 28 bp, synthetic construct
  source 1..28: mol_type = other DNA
gatagggaaggagcagggatgagactgg

SEQ ID NO: 2470 - DNA, 28 bp, synthetic construct
  source 1..28: mol_type = other DNA
gaaggagcagggatgagactggcaatgg

SEQ ID NO: 2471 - DNA, 28 bp, synthetic construct
  source 1..28: mol_type = other DNA
cagggatgagactggcaatggtcacagg

SEQ ID NO: 2472 - DNA, 28 bp, synthetic construct
  source 1..28: mol_type = other DNA
agggatgagactggcaatggtcacaggg

SEQ ID NO: 2473 - DNA, 28 bp, synthetic construct
  source 1..28: mol_type = other DNA
ctggcaatggtcacagggaaagatgtgg

SEQ ID NO: 2474 - DNA, 28 bp, synthetic construct
  source 1..28: mol_type = other DNA
cagggaaagatgtggccttttgtgatgg

SEQ ID NO: 2475 - DNA, 28 bp, synthetic construct
  source 1..28: mol_type = other DNA
taacagaaaataaaaccatcacaaaagg

SEQ ID NO: 2476 - DNA, 28 bp, synthetic construct
  source 1..28: mol_type = other DNA
tttattttctgttaacactgtgtcctgg

SEQ ID NO: 2477 - DNA, 28 bp, synthetic construct
  source 1..28: mol_type = other DNA
ttattttctgttaacactgtgtcctggg

SEQ ID NO: 2478 - DNA, 28 bp, synthetic construct
  source 1..28: mol_type = other DNA
tattttctgttaacactgtgtcctgggg

SEQ ID NO: 2479 - DNA, 28 bp, synthetic construct
  source 1..28: mol_type = other DNA
attttctgttaacactgtgtcctggggg

SEQ ID NO: 2480 - DNA, 28 bp, synthetic construct
  source 1..28: mol_type = other DNA
ttttctgttaacactgtgtcctgggggg

SEQ ID NO: 2481 - DNA, 28 bp, synthetic construct
  source 1..28: mol_type = other DNA
tttctgttaacactgtgtcctggggggg

SEQ ID NO: 2482 - DNA, 28 bp, synthetic construct
  source 1..28: mol_type = other DNA
tgttaacactgtgtcctgggggggctgg

SEQ ID NO: 2483 - DNA, 28 bp, synthetic construct
  source 1..28: mol_type = other DNA
gttaacactgtgtcctgggggggctggg

SEQ ID NO: 2484 - DNA, 28 bp, synthetic construct
  source 1..28: mol_type = other DNA
atgcaggggacttcccagcccccccagg

SEQ ID NO: 2485 - DNA, 28 bp, synthetic construct
  source 1..28: mol_type = other DNA
gggctgggaagtcccctgcatcccatgg

SEQ ID NO: 2486 - DNA, 28 bp, synthetic construct
  source 1..28: mol_type = other DNA
aagtcccctgcatcccatggtaccctgg

SEQ ID NO: 2487 - DNA, 28 bp, synthetic construct
  source 1..28: mol_type = other DNA
aataccagggtaccatgggatgcagggg

SEQ ID NO: 2488 - DNA, 28 bp, synthetic construct
  source 1..28: mol_type = other DNA
caataccagggtaccatgggatgcaggg

SEQ ID NO: 2489 - DNA, 28 bp, synthetic construct
  source 1..28: mol_type = other DNA
cctgcatcccatggtaccctggtattgg

SEQ ID NO: 2490 - DNA, 28 bp, synthetic construct
  source 1..28: mol_type = other DNA
ctgcatcccatggtaccctggtattggg

SEQ ID NO: 2491 - DNA, 28 bp, synthetic construct
  source 1..28: mol_type = other DNA
tgctgtcccaataccagggtaccatggg

SEQ ID NO: 2492 - DNA, 28 bp, synthetic construct
  source 1..28: mol_type = other DNA
ttgctgtcccaataccagggtaccatgg

SEQ ID NO: 2493 - DNA, 28 bp, synthetic construct
  source 1..28: mol_type = other DNA
actggcttttgctgtcccaataccaggg

SEQ ID NO: 2494 - DNA, 28 bp, synthetic construct
  source 1..28: mol_type = other DNA
tactggcttttgctgtcccaataccagg

SEQ ID NO: 2495 - DNA, 28 bp, synthetic construct
  source 1..28: mol_type = other DNA
gcaaaagccagtaaccatgagtatgagg

SEQ ID NO: 2496 - DNA, 28 bp, synthetic construct
  source 1..28: mol_type = other DNA
gagatttcctcatactcatggttactgg

SEQ ID NO: 2497 - DNA, 28 bp, synthetic construct
  source 1..28: mol_type = other DNA
acagaaagagatttcctcatactcatgg

SEQ ID NO: 2498 - DNA, 28 bp, synthetic construct
  source 1..28: mol_type = other DNA
gtatgaggaaatctctttctgttgctgg

SEQ ID NO: 2499 - DNA, 28 bp, synthetic construct
  source 1..28: mol_type = other DNA
gcttacagtttctctgtgtgctttgtgg

SEQ ID NO: 2500 - DNA, 28 bp, synthetic construct
  source 1..28: mol_type = other DNA
atttgctctagaagaaaaaaaaaaaagg

SEQ ID NO: 2501 - DNA, 28 bp, synthetic construct
  source 1..28: mol_type = other DNA
tgctctagaagaaaaaaaaaaaaggagg

SEQ ID NO: 2502 - DNA, 28 bp, synthetic construct
  source 1..28: mol_type = other DNA
gctctagaagaaaaaaaaaaaaggaggg

SEQ ID NO: 2503 - DNA, 28 bp, synthetic construct
  source 1..28: mol_type = other DNA
ctctagaagaaaaaaaaaaaaggagggg

SEQ ID NO: 2504 - DNA, 28 bp, synthetic construct
  source 1..28: mol_type = other DNA
ggaaatgcattttccccagagataaagg

SEQ ID NO: 2505 - DNA, 28 bp, synthetic construct
  source 1..28: mol_type = other DNA
tccccagagataaaggctgccattttgg

SEQ ID NO: 2506 - DNA, 28 bp, synthetic construct
  source 1..28: mol_type = other DNA
ccccagagataaaggctgccattttggg

SEQ ID NO: 2507 - DNA, 28 bp, synthetic construct
  source 1..28: mol_type = other DNA
cccagagataaaggctgccattttgggg

SEQ ID NO: 2508 - DNA, 28 bp, synthetic construct
  source 1..28: mol_type = other DNA
ccagagataaaggctgccattttggggg

SEQ ID NO: 2509 - DNA, 28 bp, synthetic construct
  source 1..28: mol_type = other DNA
ctgccattttgggggtctgtacttatgg

SEQ ID NO: 2510 - DNA, 28 bp, synthetic construct
  source 1..28: mol_type = other DNA
aggccataagtacagacccccaaaatgg

SEQ ID NO: 2511 - DNA, 28 bp, synthetic construct
  source 1..28: mol_type = other DNA
agagttatggatcacaaatattttcagg

SEQ ID NO: 2512 - DNA, 28 bp, synthetic construct
  source 1..28: mol_type = other DNA
tatgagtaaaggctgtgtagagttatgg

SEQ ID NO: 2513 - DNA, 28 bp, synthetic construct
  source 1..28: mol_type = other DNA
ctacacagcctttactcatactattagg

SEQ ID NO: 2514 - DNA, 28 bp, synthetic construct
  source 1..28: mol_type = other DNA
aaagtgtgcctaatagtatgagtaaagg

SEQ ID NO: 2515 - DNA, 28 bp, synthetic construct
  source 1..28: mol_type = other DNA
tgggaaaaacttagggggctctaagggg

SEQ ID NO: 2516 - DNA, 28 bp, synthetic construct
  source 1..28: mol_type = other DNA
ctgggaaaaacttagggggctctaaggg

SEQ ID NO: 2517 - DNA, 28 bp, synthetic construct
  source 1..28: mol_type = other DNA
tctgggaaaaacttagggggctctaagg

SEQ ID NO: 2518 - DNA, 28 bp, synthetic construct
  source 1..28: mol_type = other DNA
aagattcgtctgggaaaaacttaggggg

SEQ ID NO: 2519 - DNA, 28 bp, synthetic construct
  source 1..28: mol_type = other DNA
aaagattcgtctgggaaaaacttagggg

SEQ ID NO: 2520 - DNA, 28 bp, synthetic construct
  source 1..28: mol_type = other DNA
taaagattcgtctgggaaaaacttaggg

SEQ ID NO: 2521 - DNA, 28 bp, synthetic construct
  source 1..28: mol_type = other DNA
ataaagattcgtctgggaaaaacttagg

SEQ ID NO: 2522 - DNA, 28 bp, synthetic construct
  source 1..28: mol_type = other DNA
ggaaagaaattataaagattcgtctggg

SEQ ID NO: 2523 - DNA, 28 bp, synthetic construct
  source 1..28: mol_type = other DNA
tggaaagaaattataaagattcgtctgg

SEQ ID NO: 2524 - DNA, 28 bp, synthetic construct
  source 1..28: mol_type = other DNA
aacactgaagtttatttggtatctttgg

SEQ ID NO: 2525 - DNA, 28 bp, synthetic construct
  source 1..28: mol_type = other DNA
ttagatgaaaacactgaagtttatttgg

SEQ ID NO: 2526 - DNA, 28 bp, synthetic construct
  source 1..28: mol_type = other DNA
taattactttttttcacattaagaatgg

SEQ ID NO: 2527 - DNA, 28 bp, synthetic construct
  source 1..28: mol_type = other DNA
acaaagaataggtggctttctattaggg

SEQ ID NO: 2528 - DNA, 28 bp, synthetic construct
  source 1..28: mol_type = other DNA
aacaaagaataggtggctttctattagg

SEQ ID NO: 2529 - DNA, 28 bp, synthetic construct
  source 1..28: mol_type = other DNA
taatagaaagccacctattctttgttgg

SEQ ID NO: 2530 - DNA, 28 bp, synthetic construct
  source 1..28: mol_type = other DNA
ttgaagaaatccaacaaagaataggtgg

SEQ ID NO: 2531 - DNA, 28 bp, synthetic construct
  source 1..28: mol_type = other DNA
aacttgaagaaatccaacaaagaatagg

SEQ ID NO: 2532 - DNA, 28 bp, synthetic construct
  source 1..28: mol_type = other DNA
atggctgtcatagccgagaacaatgggg

SEQ ID NO: 2533 - RNA, 20 nt, synthetic construct
  source 1..20: mol_type = other RNA
aactatacaatatcccactt

SEQ ID NO: 2534 - RNA, 20 nt, synthetic construct
  source 1..20: mol_type = other RNA
actatacaatatcccactta

SEQ ID NO: 2535 - RNA, 20 nt, synthetic construct
  source 1..20: mol_type = other RNA
ccacttagggatgcatacag

SEQ ID NO: 2536 - RNA, 20 nt, synthetic construct
  source 1..20: mol_type = other RNA
cttagggatgcatacagagg

SEQ ID NO: 2537 - RNA, 20 nt, synthetic construct
  source 1..20: mol_type = other RNA
ctctgtatgcatccctaagt

SEQ ID NO: 2538 - RNA, 20 nt, synthetic construct
  source 1..20: mol_type = other RNA
cctctgtatgcatccctaag

SEQ ID NO: 2539 - RNA, 20 nt, synthetic construct
  source 1..20: mol_type = other RNA
gactagcacaattaaagttc

SEQ ID NO: 2540 - RNA, 20 nt, synthetic construct
  source 1..20: mol_type = other RNA
gttcaggaaactagttcttc

SEQ ID NO: 2541 - RNA, 20 nt, synthetic construct
  source 1..20: mol_type = other RNA
gaaactagttcttcaggatg

SEQ ID NO: 2542 - RNA, 20 nt, synthetic construct
  source 1..20: mol_type = other RNA
aaactagttcttcaggatgt

SEQ ID NO: 2543 - RNA, 20 nt, synthetic construct
  source 1..20: mol_type = other RNA
tagttcttcaggatgtgggc

SEQ ID NO: 2544 - RNA, 20 nt, synthetic construct
  source 1..20: mol_type = other RNA
ttcttcaggatgtgggcagg

SEQ ID NO: 2545 - RNA, 20 nt, synthetic construct
  source 1..20: mol_type = other RNA
atgtgggcaggaggctgtga

SEQ ID NO: 2546 - RNA, 20 nt, synthetic construct
  source 1..20: mol_type = other RNA
tgtgggcaggaggctgtgat

SEQ ID NO: 2547 - RNA, 20 nt, synthetic construct
  source 1..20: mol_type = other RNA
gtgggcaggaggctgtgatg

SEQ ID NO: 2548 - RNA, 20 nt, synthetic construct
  source 1..20: mol_type = other RNA
tgggcaggaggctgtgatgg

SEQ ID NO: 2549 - RNA, 20 nt, synthetic construct
  source 1..20: mol_type = other RNA
gctgtgatgggggcacccag

SEQ ID NO: 2550 - RNA, 20 nt, synthetic construct
  source 1..20: mol_type = other RNA
ctgtgatgggggcacccaga

SEQ ID NO: 2551 - RNA, 20 nt, synthetic construct
  source 1..20: mol_type = other RNA
ggggcacccagagggcctca

SEQ ID NO: 2552 - RNA, 20 nt, synthetic construct
  source 1..20: mol_type = other RNA
cccagagggcctcaaggtac

SEQ ID NO: 2553 - RNA, 20 nt, synthetic construct
  source 1..20: mol_type = other RNA
ccagtaccttgaggccctct

SEQ ID NO: 2554 - RNA, 20 nt, synthetic construct
  source 1..20: mol_type = other RNA
gggcctcaaggtactggcac

SEQ ID NO: 2555 - RNA, 20 nt, synthetic construct
  source 1..20: mol_type = other RNA
agaccagtgccagtaccttg

SEQ ID NO: 2556 - RNA, 20 nt, synthetic construct
  source 1..20: mol_type = other RNA
actggtctattttttaagtt

SEQ ID NO: 2557 - RNA, 20 nt, synthetic construct
  source 1..20: mol_type = other RNA
ctattttttaagttaggtga

SEQ ID NO: 2558 - RNA, 20 nt, synthetic construct
  source 1..20: mol_type = other RNA
taagttaggtgatggataca

SEQ ID NO: 2559 - RNA, 20 nt, synthetic construct
  source 1..20: mol_type = other RNA
tacatgtacagttgtgtcta

SEQ ID NO: 2560 - RNA, 20 nt, synthetic construct
  source 1..20: mol_type = other RNA
attataacactagcacttat

SEQ ID NO: 2561 - RNA, 20 nt, synthetic construct
  source 1..20: mol_type = other RNA
taggatacatgcctatgatg

SEQ ID NO: 2562 - RNA, 20 nt, synthetic construct
  source 1..20: mol_type = other RNA
cattctctctacctcatcat

SEQ ID NO: 2563 - RNA, 20 nt, synthetic construct
  source 1..20: mol_type = other RNA
aggtagagagaatgtaacaa

SEQ ID NO: 2564 - RNA, 20 nt, synthetic construct
  source 1..20: mol_type = other RNA
gagagaatgtaacaaaggac

SEQ ID NO: 2565 - RNA, 20 nt, synthetic construct
  source 1..20: mol_type = other RNA
gactggcacatagtaagcac

SEQ ID NO: 2566 - RNA, 20 nt, synthetic construct
  source 1..20: mol_type = other RNA
tggcacatagtaagcactgg

SEQ ID NO: 2567 - RNA, 20 nt, synthetic construct
  source 1..20: mol_type = other RNA
tagtaagcactggtggcatg

SEQ ID NO: 2568 - RNA, 20 nt, synthetic construct
  source 1..20: mol_type = other RNA
tggctctgtcctccagcgtg

SEQ ID NO: 2569 - RNA, 20 nt, synthetic construct
  source 1..20: mol_type = other RNA
ggctctgtcctccagcgtgt

SEQ ID NO: 2570 - RNA, 20 nt, synthetic construct
  source 1..20: mol_type = other RNA
acacagagcccacacgctgg

SEQ ID NO: 2571 - RNA, 20 nt, synthetic construct
  source 1..20: mol_type = other RNA
aaaacacagagcccacacgc

SEQ ID NO: 2572 - RNA, 20 nt, synthetic construct
  source 1..20: mol_type = other RNA
gcacacacacacacacacat

SEQ ID NO: 2573 - RNA, 20 nt, synthetic construct
  source 1..20: mol_type = other RNA
acacacacacataggaagcc

SEQ ID NO: 2574 - RNA, 20 nt, synthetic construct
  source 1..20: mol_type = other RNA
actgagggcagaggggagcc

SEQ ID NO: 2575 - RNA, 20 nt, synthetic construct
  source 1..20: mol_type = other RNA
cctctgccctcagtcactcg

SEQ ID NO: 2576 - RNA, 20 nt, synthetic construct
  source 1..20: mol_type = other RNA
acgagtgactgagggcagag

SEQ ID NO: 2577 - RNA, 20 nt, synthetic construct
  source 1..20: mol_type = other RNA
cacgagtgactgagggcaga

SEQ ID NO: 2578 - RNA, 20 nt, synthetic construct
  source 1..20: mol_type = other RNA
ccacgagtgactgagggcag

SEQ ID NO: 2579 - RNA, 20 nt, synthetic construct
  source 1..20: mol_type = other RNA
tgtgaaccacgagtgactga

SEQ ID NO: 2580 - RNA, 20 nt, synthetic construct
  source 1..20: mol_type = other RNA
ttgtgaaccacgagtgactg

SEQ ID NO: 2581 - RNA, 20 nt, synthetic construct
  source 1..20: mol_type = other RNA
tcactcgtggttcacaaaaa

SEQ ID NO: 2582 - RNA, 20 nt, synthetic construct
  source 1..20: mol_type = other RNA
tcacaaaaatggcaaataat

SEQ ID NO: 2583 - RNA, 20 nt, synthetic construct
  source 1..20: mol_type = other RNA
aataataggagcactagaat

SEQ ID NO: 2584 - RNA, 20 nt, synthetic construct
  source 1..20: mol_type = other RNA
agaataggagctctccatcc

SEQ ID NO: 2585 - RNA, 20 nt, synthetic construct
  source 1..20: mol_type = other RNA
ctggttcgagtctttccagc

SEQ ID NO: 2586 - RNA, 20 nt, synthetic construct
  source 1..20: mol_type = other RNA
tggttcgagtctttccagct

SEQ ID NO: 2587 - RNA, 20 nt, synthetic construct
  source 1..20: mol_type = other RNA
ggttcgagtctttccagctg

SEQ ID NO: 2588 - RNA, 20 nt, synthetic construct
  source 1..20: mol_type = other RNA
cagctggaaagactcgaacc

SEQ ID NO: 2589 - RNA, 20 nt, synthetic construct
  source 1..20: mol_type = other RNA
aaaggctaaactgccccagc

SEQ ID NO: 2590 - RNA, 20 nt, synthetic construct
  source 1..20: mol_type = other RNA
agcctttgcagaatttctca

SEQ ID NO: 2591 - RNA, 20 nt, synthetic construct
  source 1..20: mol_type = other RNA
gcctttgcagaatttctcaa

SEQ ID NO: 2592 - RNA, 20 nt, synthetic construct
  source 1..20: mol_type = other RNA
acccttgagaaattctgcaa

SEQ ID NO: 2593 - RNA, 20 nt, synthetic construct
  source 1..20: mol_type = other RNA
actcacgggcttacagacag

SEQ ID NO: 2594 - RNA, 20 nt, synthetic construct
  source 1..20: mol_type = other RNA
ctttacaggcttacactcac

SEQ ID NO: 2595 - RNA, 20 nt, synthetic construct
  source 1..20: mol_type = other RNA
actttacaggcttacactca

SEQ ID NO: 2596 - RNA, 20 nt, synthetic construct
  source 1..20: mol_type = other RNA
taaagtgctgtgctcatgcg

SEQ ID NO: 2597 - RNA, 20 nt, synthetic construct
  source 1..20: mol_type = other RNA
aaagtgctgtgctcatgcga

SEQ ID NO: 2598 - RNA, 20 nt, synthetic construct
  source 1..20: mol_type = other RNA
ctgtgctcatgcgagggatc

SEQ ID NO: 2599 - RNA, 20 nt, synthetic construct
  source 1..20: mol_type = other RNA
gcgagggatcaggtctgacc

SEQ ID NO: 2600 - RNA, 20 nt, synthetic construct
  source 1..20: mol_type = other RNA
cgagggatcaggtctgacct

SEQ ID NO: 2601 - RNA, 20 nt, synthetic construct
  source 1..20: mol_type = other RNA
ggaaactaaaagcatcttca

SEQ ID NO: 2602 - RNA, 20 nt, synthetic construct
  source 1..20: mol_type = other RNA
gaagatgcttttagtttccc

SEQ ID NO: 2603 - RNA, 20 nt, synthetic construct
  source 1..20: mol_type = other RNA
aaaagcatcttcatggagca

SEQ ID NO: 2604 - RNA, 20 nt, synthetic construct
  source 1..20: mol_type = other RNA
aaagcatcttcatggagcaa

SEQ ID NO: 2605 - RNA, 20 nt, synthetic construct
  source 1..20: mol_type = other RNA
gagcaagggtgctcctccag

SEQ ID NO: 2606 - RNA, 20 nt, synthetic construct
  source 1..20: mol_type = other RNA
agcaagggtgctcctccagt

SEQ ID NO: 2607 - RNA, 20 nt, synthetic construct
  source 1..20: mol_type = other RNA
gcaagggtgctcctccagtg

SEQ ID NO: 2608 - RNA, 20 nt, synthetic construct
  source 1..20: mol_type = other RNA
caagggtgctcctccagtgg

SEQ ID NO: 2609 - RNA, 20 nt, synthetic construct
  source 1..20: mol_type = other RNA
tcactgagcgcccccactgg

SEQ ID NO: 2610 - RNA, 20 nt, synthetic construct
  source 1..20: mol_type = other RNA
aactcactgagcgcccccac

SEQ ID NO: 2611 - RNA, 20 nt, synthetic construct
  source 1..20: mol_type = other RNA
ggggcgctcagtgagttctg

SEQ ID NO: 2612 - RNA, 20 nt, synthetic construct
  source 1..20: mol_type = other RNA
gctcagtgagttctgcggta

SEQ ID NO: 2613 - RNA, 20 nt, synthetic construct
  source 1..20: mol_type = other RNA
ctcagtgagttctgcggtat

SEQ ID NO: 2614 - RNA, 20 nt, synthetic construct
  source 1..20: mol_type = other RNA
tgggtgacagtattcttgtg

SEQ ID NO: 2615 - RNA, 20 nt, synthetic construct
  source 1..20: mol_type = other RNA
ttgtgtggacagtattcatg

SEQ ID NO: 2616 - RNA, 20 nt, synthetic construct
  source 1..20: mol_type = other RNA
gacagtattcatgtggtgat

SEQ ID NO: 2617 - RNA, 20 nt, synthetic construct
  source 1..20: mol_type = other RNA
acagtattcatgtggtgatt

SEQ ID NO: 2618 - RNA, 20 nt, synthetic construct
  source 1..20: mol_type = other RNA
cagtattcatgtggtgattg

SEQ ID NO: 2619 - RNA, 20 nt, synthetic construct
  source 1..20: mol_type = other RNA
catgtggtgattggggtaaa

SEQ ID NO: 2620 - RNA, 20 nt, synthetic construct
  source 1..20: mol_type = other RNA
gtaaatggccctcttttgcc

SEQ ID NO: 2621 - RNA, 20 nt, synthetic construct
  source 1..20: mol_type = other RNA
ttttgcctggttttctgcct

SEQ ID NO: 2622 - RNA, 20 nt, synthetic construct
  source 1..20: mol_type = other RNA
ggcagaaaaccaggcaaaag

SEQ ID NO: 2623 - RNA, 20 nt, synthetic construct
  source 1..20: mol_type = other RNA
aatgaccgaggcagaaaacc

SEQ ID NO: 2624 - RNA, 20 nt, synthetic construct
  source 1..20: mol_type = other RNA
cagcagatgcacaatgaccg

SEQ ID NO: 2625 - RNA, 20 nt, synthetic construct
  source 1..20: mol_type = other RNA
tgctgactgaacctgccttt

SEQ ID NO: 2626 - RNA, 20 nt, synthetic construct
  source 1..20: mol_type = other RNA
ctttactaggaccaaaaggc

SEQ ID NO: 2627 - RNA, 20 nt, synthetic construct
  source 1..20: mol_type = other RNA
tgtactttactaggaccaaa

SEQ ID NO: 2628 - RNA, 20 nt, synthetic construct
  source 1..20: mol_type = other RNA
cctagtaaagtacagatttc

SEQ ID NO: 2629 - RNA, 20 nt, synthetic construct
  source 1..20: mol_type = other RNA
cctgaaatctgtactttact

SEQ ID NO: 2630 - RNA, 20 nt, synthetic construct
  source 1..20: mol_type = other RNA
gatttcaggaaaagtgtacc

SEQ ID NO: 2631 - RNA, 20 nt, synthetic construct
  source 1..20: mol_type = other RNA
aggaaaagtgtacctggccc

SEQ ID NO: 2632 - RNA, 20 nt, synthetic construct
  source 1..20: mol_type = other RNA
ggaaaagtgtacctggcccc

SEQ ID NO: 2633 - RNA, 20 nt, synthetic construct
  source 1..20: mol_type = other RNA
gaaaagtgtacctggccccg

SEQ ID NO: 2634 - RNA, 20 nt, synthetic construct
  source 1..20: mol_type = other RNA
aaaagtgtacctggccccgg

SEQ ID NO: 2635 - RNA, 20 nt, synthetic construct
  source 1..20: mol_type = other RNA
agtgtacctggccccggggg

SEQ ID NO: 2636 - RNA, 20 nt, synthetic construct
  source 1..20: mol_type = other RNA
ggttggccacccccggggcc

SEQ ID NO: 2637 - RNA, 20 nt, synthetic construct
  source 1..20: mol_type = other RNA
acagaggttggccacccccg

SEQ ID NO: 2638 - RNA, 20 nt, synthetic construct
  source 1..20: mol_type = other RNA
cacagaggttggccaccccc

SEQ ID NO: 2639 - RNA, 20 nt, synthetic construct
  source 1..20: mol_type = other RNA
ggtggccaacctctgtgtga

SEQ ID NO: 2640 - RNA, 20 nt, synthetic construct
  source 1..20: mol_type = other RNA
taaagccgtcacacagaggt

SEQ ID NO: 2641 - RNA, 20 nt, synthetic construct
  source 1..20: mol_type = other RNA
tgcttaaagccgtcacacag

SEQ ID NO: 2642 - RNA, 20 nt, synthetic construct
  source 1..20: mol_type = other RNA
tttaagcacagtgtgtcttg

SEQ ID NO: 2643 - RNA, 20 nt, synthetic construct
  source 1..20: mol_type = other RNA
ttaagcacagtgtgtcttga

SEQ ID NO: 2644 - RNA, 20 nt, synthetic construct
  source 1..20: mol_type = other RNA
taagcacagtgtgtcttgag

SEQ ID NO: 2645 - RNA, 20 nt, synthetic construct
  source 1..20: mol_type = other RNA
aagcacagtgtgtcttgagg

SEQ ID NO: 2646 - RNA, 20 nt, synthetic construct
  source 1..20: mol_type = other RNA
ggcacttttcagatggagtc

SEQ ID NO: 2647 - RNA, 20 nt, synthetic construct
  source 1..20: mol_type = other RNA
ccatctgaaaagtgcctgtc

SEQ ID NO: 2648 - RNA, 20 nt, synthetic construct
  source 1..20: mol_type = other RNA
ccagacaggcacttttcaga

SEQ ID NO: 2649 - RNA, 20 nt, synthetic construct
  source 1..20: mol_type = other RNA
atagacaggtacatccagac

SEQ ID NO: 2650 - RNA, 20 nt, synthetic construct
  source 1..20: mol_type = other RNA
gatgtacctgtctataacca

SEQ ID NO: 2651 - RNA, 20 nt, synthetic construct
  source 1..20: mol_type = other RNA
gcaggtccatggttatagac

SEQ ID NO: 2652 - RNA, 20 nt, synthetic construct
  source 1..20: mol_type = other RNA
taaccatggacctgcctcca

SEQ ID NO: 2653 - RNA, 20 nt, synthetic construct
  source 1..20: mol_type = other RNA
ggacctgcctccaaggtgcg

SEQ ID NO: 2654 - RNA, 20 nt, synthetic construct
  source 1..20: mol_type = other RNA
gcaccttggaggcaggtcca

SEQ ID NO: 2655 - RNA, 20 nt, synthetic construct
  source 1..20: mol_type = other RNA
ggtccacgcaccttggaggc

SEQ ID NO: 2656 - RNA, 20 nt, synthetic construct
  source 1..20: mol_type = other RNA
ggttggtccacgcaccttgg

SEQ ID NO: 2657 - RNA, 20 nt, synthetic construct
  source 1..20: mol_type = other RNA
ggaggttggtccacgcacct

SEQ ID NO: 2658 - RNA, 20 nt, synthetic construct
  source 1..20: mol_type = other RNA
tgaatcaggtacgcggaggt

SEQ ID NO: 2659 - RNA, 20 nt, synthetic construct
  source 1..20: mol_type = other RNA
cgagtgaatcaggtacgcgg

SEQ ID NO: 2660 - RNA, 20 nt, synthetic construct
  source 1..20: mol_type = other RNA
catcgagtgaatcaggtacg

SEQ ID NO: 2661 - RNA, 20 nt, synthetic construct
  source 1..20: mol_type = other RNA
tgattcactcgatgcgcacc

SEQ ID NO: 2662 - RNA, 20 nt, synthetic construct
  source 1..20: mol_type = other RNA
aggtgcgcatcgagtgaatc

SEQ ID NO: 2663 - RNA, 20 nt, synthetic construct
  source 1..20: mol_type = other RNA
tggccgtacgtagcttcatc

SEQ ID NO: 2664 - RNA, 20 nt, synthetic construct
  source 1..20: mol_type = other RNA
tgatgaagctacgtacggcc

SEQ ID NO: 2665 - RNA, 20 nt, synthetic construct
  source 1..20: mol_type = other RNA
cgtacgtagcttcatcaggc

SEQ ID NO: 2666 - RNA, 20 nt, synthetic construct
  source 1..20: mol_type = other RNA
gtacgtagcttcatcaggca

SEQ ID NO: 2667 - RNA, 20 nt, synthetic construct
  source 1..20: mol_type = other RNA
ctgcctgatgaagctacgta

SEQ ID NO: 2668 - RNA, 20 nt, synthetic construct
  source 1..20: mol_type = other RNA
ggtgtacctgtcaagttctt

SEQ ID NO: 2669 - RNA, 20 nt, synthetic construct
  source 1..20: mol_type = other RNA
ctcggacctaagaacttgac

SEQ ID NO: 2670 - RNA, 20 nt, synthetic construct
  source 1..20: mol_type = other RNA
ttcttaggtccgagtgttcg

SEQ ID NO: 2671 - RNA, 20 nt, synthetic construct
  source 1..20: mol_type = other RNA
caggtaaagccgcgaacact

SEQ ID NO: 2672 - RNA, 20 nt, synthetic construct
  source 1..20: mol_type = other RNA
gttcgcggctttacctgtcc

SEQ ID NO: 2673 - RNA, 20 nt, synthetic construct
  source 1..20: mol_type = other RNA
gcggacggcggtaccaggac

SEQ ID NO: 2674 - RNA, 20 nt, synthetic construct
  source 1..20: mol_type = other RNA
tggtaccgccgtccgcacct

SEQ ID NO: 2675 - RNA, 20 nt, synthetic construct
  source 1..20: mol_type = other RNA
gaggtgcggacggcggtacc

SEQ ID NO: 2676 - RNA, 20 nt, synthetic construct
  source 1..20: mol_type = other RNA
actgaccgaggtgcggacgg

SEQ ID NO: 2677 - RNA, 20 nt, synthetic construct
  source 1..20: mol_type = other RNA
cgcactgaccgaggtgcgga

SEQ ID NO: 2678 - RNA, 20 nt, synthetic construct
  source 1..20: mol_type = other RNA
cacctcggtcagtgcgtccc

SEQ ID NO: 2679 - RNA, 20 nt, synthetic construct
  source 1..20: mol_type = other RNA
gggacgcactgaccgaggtg

SEQ ID NO: 2680 - RNA, 20 nt, synthetic construct
  source 1..20: mol_type = other RNA
tcggtcagtgcgtccccggc

SEQ ID NO: 2681 - RNA, 20 nt, synthetic construct
  source 1..20: mol_type = other RNA
tgccggggacgcactgaccg

SEQ ID NO: 2682 - RNA, 20 nt, synthetic construct
  source 1..20: mol_type = other RNA
tcaggtacacgcacctgccg

SEQ ID NO: 2683 - RNA, 20 nt, synthetic construct
  source 1..20: mol_type = other RNA
atcaggtacacgcacctgcc

SEQ ID NO: 2684 - RNA, 20 nt, synthetic construct
  source 1..20: mol_type = other RNA
aatcaggtacacgcacctgc

SEQ ID NO: 2685 - RNA, 20 nt, synthetic construct
  source 1..20: mol_type = other RNA
agataagcacggactgaatc

SEQ ID NO: 2686 - RNA, 20 nt, synthetic construct
  source 1..20: mol_type = other RNA
ccgtgcttatcttgcgcata

SEQ ID NO: 2687 - RNA, 20 nt, synthetic construct
  source 1..20: mol_type = other RNA
cgtgcttatcttgcgcatac

SEQ ID NO: 2688 - RNA, 20 nt, synthetic construct
  source 1..20: mol_type = other RNA
ccgtatgcgcaagataagca

SEQ ID NO: 2689 - RNA, 20 nt, synthetic construct
  source 1..20: mol_type = other RNA
gggccgttcagtgtcccgct

SEQ ID NO: 2690 - RNA, 20 nt, synthetic construct
  source 1..20: mol_type = other RNA
gctccgagcgggacactgaa

SEQ ID NO: 2691 - RNA, 20 nt, synthetic construct
  source 1..20: mol_type = other RNA
ggcggcgacgagctccgagc

SEQ ID NO: 2692 - RNA, 20 nt, synthetic construct
  source 1..20: mol_type = other RNA
cggcggcgacgagctccgag

SEQ ID NO: 2693 - RNA, 20 nt, synthetic construct
  source 1..20: mol_type = other RNA
tcgtcgccgccgcagccttg

SEQ ID NO: 2694 - RNA, 20 nt, synthetic construct
  source 1..20: mol_type = other RNA
tcggagcctcaaggctgcgg

SEQ ID NO: 2695 - RNA, 20 nt, synthetic construct
  source 1..20: mol_type = other RNA
gggtcggagcctcaaggctg

SEQ ID NO: 2696 - RNA, 20 nt, synthetic construct
  source 1..20: mol_type = other RNA
ttgaggctccgacccccgct

SEQ ID NO: 2697 - RNA, 20 nt, synthetic construct
  source 1..20: mol_type = other RNA
tgaggctccgacccccgctt

SEQ ID NO: 2698 - RNA, 20 nt, synthetic construct
  source 1..20: mol_type = other RNA
aagcgggggtcggagcctca

SEQ ID NO: 2699 - RNA, 20 nt, synthetic construct
  source 1..20: mol_type = other RNA
acccccgcttgggccccgtc

SEQ ID NO: 2700 - RNA, 20 nt, synthetic construct
  source 1..20: mol_type = other RNA
gacggggcccaagcgggggt

SEQ ID NO: 2701 - RNA, 20 nt, synthetic construct
  source 1..20: mol_type = other RNA
gccggacggggcccaagcgg

SEQ ID NO: 2702 - RNA, 20 nt, synthetic construct
  source 1..20: mol_type = other RNA
cgccggacggggcccaagcg

SEQ ID NO: 2703 - RNA, 20 nt, synthetic construct
  source 1..20: mol_type = other RNA
gcgccggacggggcccaagc

SEQ ID NO: 2704 - RNA, 20 nt, synthetic construct
  source 1..20: mol_type = other RNA
cgcgccggacggggcccaag

SEQ ID NO: 2705 - RNA, 20 nt, synthetic construct
  source 1..20: mol_type = other RNA
gggccccgtccggcgcgcag

SEQ ID NO: 2706 - RNA, 20 nt, synthetic construct
  source 1..20: mol_type = other RNA
cgtccggcgcgcagcggccg

SEQ ID NO: 2707 - RNA, 20 nt, synthetic construct
  source 1..20: mol_type = other RNA
gtccggcgcgcagcggccgc

SEQ ID NO: 2708 - RNA, 20 nt, synthetic construct
  source 1..20: mol_type = other RNA
tccggcgcgcagcggccgcg

SEQ ID NO: 2709 - RNA, 20 nt, synthetic construct
  source 1..20: mol_type = other RNA
ccggcgcgcagcggccgcgg

SEQ ID NO: 2710 - RNA, 20 nt, synthetic construct
  source 1..20: mol_type = other RNA
cgcggccgctgcgcgccgga

SEQ ID NO: 2711 - RNA, 20 nt, synthetic construct
  source 1..20: mol_type = other RNA
gcgcgcagcggccgcggggg

SEQ ID NO: 2712 - RNA, 20 nt, synthetic construct
  source 1..20: mol_type = other RNA
cgcgcagcggccgcgggggc

SEQ ID NO: 2713 - RNA, 20 nt, synthetic construct
  source 1..20: mol_type = other RNA
gcgcagcggccgcgggggcg

SEQ ID NO: 2714 - RNA, 20 nt, synthetic construct
  source 1..20: mol_type = other RNA
gggggcggggccgcgacgcg

SEQ ID NO: 2715 - RNA, 20 nt, synthetic construct
  source 1..20: mol_type = other RNA
gcgtcgcggccccgcccccg

SEQ ID NO: 2716 - RNA, 20 nt, synthetic construct
  source 1..20: mol_type = other RNA
cggggccgcgacgcgaggag

SEQ ID NO: 2717 - RNA, 20 nt, synthetic construct
  source 1..20: mol_type = other RNA
cgcgacgcgaggagcggagc

SEQ ID NO: 2718 - RNA, 20 nt, synthetic construct
  source 1..20: mol_type = other RNA
acgcgaggagcggagcagga

SEQ ID NO: 2719 - RNA, 20 nt, synthetic construct
  source 1..20: mol_type = other RNA
cgcgaggagcggagcaggaa

SEQ ID NO: 2720 - RNA, 20 nt, synthetic construct
  source 1..20: mol_type = other RNA
gcgaggagcggagcaggaag

SEQ ID NO: 2721 - RNA, 20 nt, synthetic construct
  source 1..20: mol_type = other RNA
gagcggagcaggaaggggcg

SEQ ID NO: 2722 - RNA, 20 nt, synthetic construct
  source 1..20: mol_type = other RNA
gggcgaggcagccccgcccc

SEQ ID NO: 2723 - RNA, 20 nt, synthetic construct
  source 1..20: mol_type = other RNA
ggcgaggcagccccgccccc

SEQ ID NO: 2724 - RNA, 20 nt, synthetic construct
  source 1..20: mol_type = other RNA
gcgaggcagccccgcccccg

SEQ ID NO: 2725 - RNA, 20 nt, synthetic construct
  source 1..20: mol_type = other RNA
aggcagccccgcccccgggg

SEQ ID NO: 2726 - RNA, 20 nt, synthetic construct
  source 1..20: mol_type = other RNA
ccgcccccggggcggtctcc

SEQ ID NO: 2727 - RNA, 20 nt, synthetic construct
  source 1..20: mol_type = other RNA
cgcccccggggcggtctccc

SEQ ID NO: 2728 - RNA, 20 nt, synthetic construct
  source 1..20: mol_type = other RNA
gggagaccgccccgggggcg

SEQ ID NO: 2729 - RNA, 20 nt, synthetic construct
  source 1..20: mol_type = other RNA
cgggagaccgccccgggggc

SEQ ID NO: 2730 - RNA, 20 nt, synthetic construct
  source 1..20: mol_type = other RNA
cccggggcggtctcccggga

SEQ ID NO: 2731 - RNA, 20 nt, synthetic construct
  source 1..20: mol_type = other RNA
gtcccgggagaccgccccgg

SEQ ID NO: 2732 - RNA, 20 nt, synthetic construct
  source 1..20: mol_type = other RNA
cgtcccgggagaccgccccg

SEQ ID NO: 2733 - RNA, 20 nt, synthetic construct
  source 1..20: mol_type = other RNA
ccgtcccgggagaccgcccc

SEQ ID NO: 2734 - RNA, 20 nt, synthetic construct
  source 1..20: mol_type = other RNA
gccgtcccgggagaccgccc

SEQ ID NO: 2735 - RNA, 20 nt, synthetic construct
  source 1..20: mol_type = other RNA
gcaaggggcggggccgtccc

SEQ ID NO: 2736 - RNA, 20 nt, synthetic construct
  source 1..20: mol_type = other RNA
ggcaaggggcggggccgtcc

SEQ ID NO: 2737 - RNA, 20 nt, synthetic construct
  source 1..20: mol_type = other RNA
gcggaagcgggcaaggggcg

SEQ ID NO: 2738 - RNA, 20 nt, synthetic construct
  source 1..20: mol_type = other RNA
cgcggaagcgggcaaggggc

SEQ ID NO: 2739 - RNA, 20 nt, synthetic construct
  source 1..20: mol_type = other RNA
acgcggaagcgggcaagggg

SEQ ID NO: 2740 - RNA, 20 nt, synthetic construct
  source 1..20: mol_type = other RNA
ctgacgcggaagcgggcaag

SEQ ID NO: 2741 - RNA, 20 nt, synthetic construct
  source 1..20: mol_type = other RNA
actgacgcggaagcgggcaa

SEQ ID NO: 2742 - RNA, 20 nt, synthetic construct
  source 1..20: mol_type = other RNA
cactgacgcggaagcgggca

SEQ ID NO: 2743 - RNA, 20 nt, synthetic construct
  source 1..20: mol_type = other RNA
tgaggcactgacgcggaagc

SEQ ID NO: 2744 - RNA, 20 nt, synthetic construct
  source 1..20: mol_type = other RNA
gtgaggcactgacgcggaag

SEQ ID NO: 2745 - RNA, 20 nt, synthetic construct
  source 1..20: mol_type = other RNA
gtggtggtgaggcactgacg

SEQ ID NO: 2746 - RNA, 20 nt, synthetic construct
  source 1..20: mol_type = other RNA
cgcgcgggcaggtggtggtg

SEQ ID NO: 2747 - RNA, 20 nt, synthetic construct
  source 1..20: mol_type = other RNA
ggcggcgcgcgggcaggtgg

SEQ ID NO: 2748 - RNA, 20 nt, synthetic construct
  source 1..20: mol_type = other RNA
tggggcggcgcgcgggcagg

SEQ ID NO: 2749 - RNA, 20 nt, synthetic construct
  source 1..20: mol_type = other RNA
ccgcgcgccgccccatataa

SEQ ID NO: 2750 - RNA, 20 nt, synthetic construct
  source 1..20: mol_type = other RNA
ctttatatggggcggcgcgc

SEQ ID NO: 2751 - RNA, 20 nt, synthetic construct
  source 1..20: mol_type = other RNA
cctttatatggggcggcgcg

SEQ ID NO: 2752 - RNA, 20 nt, synthetic construct
  source 1..20: mol_type = other RNA
ggcggcgcctttatatgggg

SEQ ID NO: 2753 - RNA, 20 nt, synthetic construct
  source 1..20: mol_type = other RNA
gacggcggcgcctttatatg

SEQ ID NO: 2754 - RNA, 20 nt, synthetic construct
  source 1..20: mol_type = other RNA
ggacggcggcgcctttatat

SEQ ID NO: 2755 - RNA, 20 nt, synthetic construct
  source 1..20: mol_type = other RNA
aggacggcggcgcctttata

SEQ ID NO: 2756 - RNA, 20 nt, synthetic construct
  source 1..20: mol_type = other RNA
gcgccgccgtccttaccccc

SEQ ID NO: 2757 - RNA, 20 nt, synthetic construct
  source 1..20: mol_type = other RNA
ccgtccttacccccaggact

SEQ ID NO: 2758 - RNA, 20 nt, synthetic construct
  source 1..20: mol_type = other RNA
agtcctgggggtaaggacgg

SEQ ID NO: 2759 - RNA, 20 nt, synthetic construct
  source 1..20: mol_type = other RNA
ccgagtcctgggggtaagga

SEQ ID NO: 2760 - RNA, 20 nt, synthetic construct
  source 1..20: mol_type = other RNA
acccccaggactcggcccca

SEQ ID NO: 2761 - RNA, 20 nt, synthetic construct
  source 1..20: mol_type = other RNA
ggggccgagtcctgggggta

SEQ ID NO: 2762 - RNA, 20 nt, synthetic construct
  source 1..20: mol_type = other RNA
tccatggggccgagtcctgg

SEQ ID NO: 2763 - RNA, 20 nt, synthetic construct
  source 1..20: mol_type = other RNA
ctccatggggccgagtcctg

SEQ ID NO: 2764 - RNA, 20 nt, synthetic construct
  source 1..20: mol_type = other RNA
tctccatggggccgagtcct

SEQ ID NO: 2765 - RNA, 20 nt, synthetic construct
  source 1..20: mol_type = other RNA
gtctccatggggccgagtcc

SEQ ID NO: 2766 - RNA, 20 nt, synthetic construct
  source 1..20: mol_type = other RNA
cggccccatggagacgccgc

SEQ ID NO: 2767 - RNA, 20 nt, synthetic construct
  source 1..20: mol_type = other RNA
cggccggcggcgtctccatg

SEQ ID NO: 2768 - RNA, 20 nt, synthetic construct
  source 1..20: mol_type = other RNA
gcggccggcggcgtctccat

SEQ ID NO: 2769 - RNA, 20 nt, synthetic construct
  source 1..20: mol_type = other RNA
gagacgccgccggccgccgc

SEQ ID NO: 2770 - RNA, 20 nt, synthetic construct
  source 1..20: mol_type = other RNA
cgccggccgccgctggcgca

SEQ ID NO: 2771 - RNA, 20 nt, synthetic construct
  source 1..20: mol_type = other RNA
cggccgccgctggcgcatgg

SEQ ID NO: 2772 - RNA, 20 nt, synthetic construct
  source 1..20: mol_type = other RNA
ggccgccgctggcgcatggc

SEQ ID NO: 2773 - RNA, 20 nt, synthetic construct
  source 1..20: mol_type = other RNA
gccgccgctggcgcatggcg

SEQ ID NO: 2774 - RNA, 20 nt, synthetic construct
  source 1..20: mol_type = other RNA
cgccatgcgccagcggcggc

SEQ ID NO: 2775 - RNA, 20 nt, synthetic construct
  source 1..20: mol_type = other RNA
cgctggcgcatggcggggtg

SEQ ID NO: 2776 - RNA, 20 nt, synthetic construct
  source 1..20: mol_type = other RNA
accccgccatgcgccagcgg

SEQ ID NO: 2777 - RNA, 20 nt, synthetic construct
  source 1..20: mol_type = other RNA
ctcaccccgccatgcgccag

SEQ ID NO: 2778 - RNA, 20 nt, synthetic construct
  source 1..20: mol_type = other RNA
gcgcatggcggggtgaggcg

SEQ ID NO: 2779 - RNA, 20 nt, synthetic construct
  source 1..20: mol_type = other RNA
catggcggggtgaggcgcgg

SEQ ID NO: 2780 - RNA, 20 nt, synthetic construct
  source 1..20: mol_type = other RNA
atggcggggtgaggcgcggc

SEQ ID NO: 2781 - RNA, 20 nt, synthetic construct
  source 1..20: mol_type = other RNA
tggcggggtgaggcgcggcg

SEQ ID NO: 2782 - RNA, 20 nt, synthetic construct
  source 1..20: mol_type = other RNA
cggggtgaggcgcggcgggg

SEQ ID NO: 2783 - RNA, 20 nt, synthetic construct
  source 1..20: mol_type = other RNA
ggggtgaggcgcggcgggga

SEQ ID NO: 2784 - RNA, 20 nt, synthetic construct
  source 1..20: mol_type = other RNA
gaggcgcggcggggagggtg

SEQ ID NO: 2785 - RNA, 20 nt, synthetic construct
  source 1..20: mol_type = other RNA
aggcgcggcggggagggtgc

SEQ ID NO: 2786 - RNA, 20 nt, synthetic construct
  source 1..20: mol_type = other RNA
acaaccaacagggttaggga

SEQ ID NO: 2787 - RNA, 20 nt, synthetic construct
  source 1..20: mol_type = other RNA
aaccctgttggttgttcagt

SEQ ID NO: 2788 - RNA, 20 nt, synthetic construct
  source 1..20: mol_type = other RNA
ctgaacaaccaacagggtta

SEQ ID NO: 2789 - RNA, 20 nt, synthetic construct
  source 1..20: mol_type = other RNA
actgaacaaccaacagggtt

SEQ ID NO: 2790 - RNA, 20 nt, synthetic construct
  source 1..20: mol_type = other RNA
ctcctactgaacaaccaaca

SEQ ID NO: 2791 - RNA, 20 nt, synthetic construct
  source 1..20: mol_type = other RNA
tggttgttcagtaggagctg

SEQ ID NO: 2792 - RNA, 20 nt, synthetic construct
  source 1..20: mol_type = other RNA
gttcagtaggagctgtggcg

SEQ ID NO: 2793 - RNA, 20 nt, synthetic construct
  source 1..20: mol_type = other RNA
ttcagtaggagctgtggcgc

SEQ ID NO: 2794 - RNA, 20 nt, synthetic construct
  source 1..20: mol_type = other RNA
tcagtaggagctgtggcgcg

SEQ ID NO: 2795 - RNA, 20 nt, synthetic construct
  source 1..20: mol_type = other RNA
acagcttagactctcgtatt

SEQ ID NO: 2796 - RNA, 20 nt, synthetic construct
  source 1..20: mol_type = other RNA
agagtctaagctgttcactg

SEQ ID NO: 2797 - RNA, 20 nt, synthetic construct
  source 1..20: mol_type = other RNA
gagtctaagctgttcactga

SEQ ID NO: 2798 - RNA, 20 nt, synthetic construct
  source 1..20: mol_type = other RNA
agtctaagctgttcactgag

SEQ ID NO: 2799 - RNA, 20 nt, synthetic construct
  source 1..20: mol_type = other RNA
gtctaagctgttcactgagg

SEQ ID NO: 2800 - RNA, 20 nt, synthetic construct
  source 1..20: mol_type = other RNA
actgagggggcagtgagacg

SEQ ID NO: 2801 - RNA, 20 nt, synthetic construct
  source 1..20: mol_type = other RNA
ctgagggggcagtgagacgt

SEQ ID NO: 2802 - RNA, 20 nt, synthetic construct
  source 1..20: mol_type = other RNA
tgagggggcagtgagacgtg

SEQ ID NO: 2803 - RNA, 20 nt, synthetic construct
  source 1..20: mol_type = other RNA
gcagtgagacgtggggctgc

SEQ ID NO: 2804 - RNA, 20 nt, synthetic construct
  source 1..20: mol_type = other RNA
gacgtggggctgctggtcct

SEQ ID NO: 2805 - RNA, 20 nt, synthetic construct
  source 1..20: mol_type = other RNA
ggtgtcatggaagagctcct

SEQ ID NO: 2806 - RNA, 20 nt, synthetic construct
  source 1..20: mol_type = other RNA
ccatgacacctagtgttacc

SEQ ID NO: 2807 - RNA, 20 nt, synthetic construct
  source 1..20: mol_type = other RNA
catgacacctagtgttacct

SEQ ID NO: 2808 - RNA, 20 nt, synthetic construct
  source 1..20: mol_type = other RNA
ccaggtaacactaggtgtca

SEQ ID NO: 2809 - RNA, 20 nt, synthetic construct
  source 1..20: mol_type = other RNA
tggggctcccaggtaacact

SEQ ID NO: 2810 - RNA, 20 nt, synthetic construct
  source 1..20: mol_type = other RNA
gactggggcttggggctccc

SEQ ID NO: 2811 - RNA, 20 nt, synthetic construct
  source 1..20: mol_type = other RNA
ggatgggggactggggcttg

SEQ ID NO: 2812 - RNA, 20 nt, synthetic construct
  source 1..20: mol_type = other RNA
gccccagtcccccatccctc

SEQ ID NO: 2813 - RNA, 20 nt, synthetic construct
  source 1..20: mol_type = other RNA
agggatgggggactggggct

SEQ ID NO: 2814 - RNA, 20 nt, synthetic construct
  source 1..20: mol_type = other RNA
tcctgagggatgggggactg

SEQ ID NO: 2815 - RNA, 20 nt, synthetic construct
  source 1..20: mol_type = other RNA
ttcctgagggatgggggact

SEQ ID NO: 2816 - RNA, 20 nt, synthetic construct
  source 1..20: mol_type = other RNA
tttcctgagggatgggggac

SEQ ID NO: 2817 - RNA, 20 nt, synthetic construct
  source 1..20: mol_type = other RNA
catccctcaggaaatccagt

SEQ ID NO: 2818 - RNA, 20 nt, synthetic construct
  source 1..20: mol_type = other RNA
ctggatttcctgagggatgg

SEQ ID NO: 2819 - RNA, 20 nt, synthetic construct
  source 1..20: mol_type = other RNA
actggatttcctgagggatg

SEQ ID NO: 2820 - RNA, 20 nt, synthetic construct
  source 1..20: mol_type = other RNA
aactggatttcctgagggat

SEQ ID NO: 2821 - RNA, 20 nt, synthetic construct
  source 1..20: mol_type = other RNA
caactggatttcctgaggga

SEQ ID NO: 2822 - RNA, 20 nt, synthetic construct
  source 1..20: mol_type = other RNA
gttccaactggatttcctga

SEQ ID NO: 2823 - RNA, 20 nt, synthetic construct
  source 1..20: mol_type = other RNA
ggttccaactggatttcctg

SEQ ID NO: 2824 - RNA, 20 nt, synthetic construct
  source 1..20: mol_type = other RNA
agttggaacccctactttgc

SEQ ID NO: 2825 - RNA, 20 nt, synthetic construct
  source 1..20: mol_type = other RNA
gttggaacccctactttgca

SEQ ID NO: 2826 - RNA, 20 nt, synthetic construct
  source 1..20: mol_type = other RNA
tgcaaagtaggggttccaac

SEQ ID NO: 2827 - RNA, 20 nt, synthetic construct
  source 1..20: mol_type = other RNA
ctactttgcagggccatctt

SEQ ID NO: 2828 - RNA, 20 nt, synthetic construct
  source 1..20: mol_type = other RNA
aagatggccctgcaaagtag

SEQ ID NO: 2829 - RNA, 20 nt, synthetic construct
  source 1..20: mol_type = other RNA
aaagatggccctgcaaagta

SEQ ID NO: 2830 - RNA, 20 nt, synthetic construct
  source 1..20: mol_type = other RNA
caaagatggccctgcaaagt

SEQ ID NO: 2831 - RNA, 20 nt, synthetic construct
  source 1..20: mol_type = other RNA
atctttggcctgaagccacc

SEQ ID NO: 2832 - RNA, 20 nt, synthetic construct
  source 1..20: mol_type = other RNA
tggtggcttcaggccaaaga

SEQ ID NO: 2833 - RNA, 20 nt, synthetic construct
  source 1..20: mol_type = other RNA
acagctttcctggtggcttc

SEQ ID NO: 2834 - RNA, 20 nt, synthetic construct
  source 1..20: mol_type = other RNA
cagtgggacagctttcctgg

SEQ ID NO: 2835 - RNA, 20 nt, synthetic construct
  source 1..20: mol_type = other RNA
agtcagtgggacagctttcc

SEQ ID NO: 2836 - RNA, 20 nt, synthetic construct
  source 1..20: mol_type = other RNA
ccactgactgacccctctta

SEQ ID NO: 2837 - RNA, 20 nt, synthetic construct
  source 1..20: mol_type = other RNA
cttaagaggggtcagtcagt

SEQ ID NO: 2838 - RNA, 20 nt, synthetic construct
  source 1..20: mol_type = other RNA
ccttaagaggggtcagtcag

SEQ ID NO: 2839 - RNA, 20 nt, synthetic construct
  source 1..20: mol_type = other RNA
gtctgcagcttccttaagag

SEQ ID NO: 2840 - RNA, 20 nt, synthetic construct
  source 1..20: mol_type = other RNA
ttaaggaagctgcagactgc

SEQ ID NO: 2841 - RNA, 20 nt, synthetic construct
  source 1..20: mol_type = other RNA
taaggaagctgcagactgct

SEQ ID NO: 2842 - RNA, 20 nt, synthetic construct
  source 1..20: mol_type = other RNA
ctgggcccattttcagatag

SEQ ID NO: 2843 - RNA, 20 nt, synthetic construct
  source 1..20: mol_type = other RNA
cccattttcagatagaggaa

SEQ ID NO: 2844 - RNA, 20 nt, synthetic construct
  source 1..20: mol_type = other RNA
ccgttcctctatctgaaaat

SEQ ID NO: 2845 - RNA, 20 nt, synthetic construct
  source 1..20: mol_type = other RNA
tccgttcctctatctgaaaa

SEQ ID NO: 2846 - RNA, 20 nt, synthetic construct
  source 1..20: mol_type = other RNA
gatagaggaacggagagctg

SEQ ID NO: 2847 - RNA, 20 nt, synthetic construct
  source 1..20: mol_type = other RNA
acggagagctgcggcagccc

SEQ ID NO: 2848 - RNA, 20 nt, synthetic construct
  source 1..20: mol_type = other RNA
ggcagcccaggagccctgcc

SEQ ID NO: 2849 - RNA, 20 nt, synthetic construct
  source 1..20: mol_type = other RNA
ggaagcctggcagggctcct

SEQ ID NO: 2850 - RNA, 20 nt, synthetic construct
  source 1..20: mol_type = other RNA
agccctgccaggcttccttc

SEQ ID NO: 2851 - RNA, 20 nt, synthetic construct
  source 1..20: mol_type = other RNA
gccctgccaggcttccttct

SEQ ID NO: 2852 - RNA, 20 nt, synthetic construct
  source 1..20: mol_type = other RNA
acccagaaggaagcctggca

SEQ ID NO: 2853 - RNA, 20 nt, synthetic construct
  source 1..20: mol_type = other RNA
cacccagaaggaagcctggc

SEQ ID NO: 2854 - RNA, 20 nt, synthetic construct
  source 1..20: mol_type = other RNA
gctgcacccagaaggaagcc

SEQ ID NO: 2855 - RNA, 20 nt, synthetic construct
  source 1..20: mol_type = other RNA
cttctgggtgcagccacctg

SEQ ID NO: 2856 - RNA, 20 nt, synthetic construct
  source 1..20: mol_type = other RNA
ttctgggtgcagccacctgt

SEQ ID NO: 2857 - RNA, 20 nt, synthetic construct
  source 1..20: mol_type = other RNA
tgggtgcagccacctgtggg

SEQ ID NO: 2858 - RNA, 20 nt, synthetic construct
  source 1..20: mol_type = other RNA
gggtgcagccacctgtgggt

SEQ ID NO: 2859 - RNA, 20 nt, synthetic construct
  source 1..20: mol_type = other RNA
ggtgcagccacctgtgggtg

SEQ ID NO: 2860 - RNA, 20 nt, synthetic construct
  source 1..20: mol_type = other RNA
agccacctgtgggtggggcg

SEQ ID NO: 2861 - RNA, 20 nt, synthetic construct
  source 1..20: mol_type = other RNA
ggccgcgccccacccacagg

SEQ ID NO: 2862 - RNA, 20 nt, synthetic construct
  source 1..20: mol_type = other RNA
cgaggccgcgccccacccac

SEQ ID NO: 2863 - RNA, 20 nt, synthetic construct
  source 1..20: mol_type = other RNA
cgcggcctcgtctgagacca

SEQ ID NO: 2864 - RNA, 20 nt, synthetic construct
  source 1..20: mol_type = other RNA
gcctcgtctgagaccaaggc

SEQ ID NO: 2865 - RNA, 20 nt, synthetic construct
  source 1..20: mol_type = other RNA
cctcgtctgagaccaaggca

SEQ ID NO: 2866 - RNA, 20 nt, synthetic construct
  source 1..20: mol_type = other RNA
ccctgccttggtctcagacg

SEQ ID NO: 2867 - RNA, 20 nt, synthetic construct
  source 1..20: mol_type = other RNA
gtaaggcatgggccctgcct

SEQ ID NO: 2868 - RNA, 20 nt, synthetic construct
  source 1..20: mol_type = other RNA
aggacagctgagtaaggcat

SEQ ID NO: 2869 - RNA, 20 nt, synthetic construct
  source 1..20: mol_type = other RNA
aaggacagctgagtaaggca

SEQ ID NO: 2870 - RNA, 20 nt, synthetic construct
  source 1..20: mol_type = other RNA
ttagcaaggacagctgagta

SEQ ID NO: 2871 - RNA, 20 nt, synthetic construct
  source 1..20: mol_type = other RNA
atgctaggggactcttagca

SEQ ID NO: 2872 - RNA, 20 nt, synthetic construct
  source 1..20: mol_type = other RNA
gtcccctagcatcttcctga

SEQ ID NO: 2873 - RNA, 20 nt, synthetic construct
  source 1..20: mol_type = other RNA
gaccatcaggaagatgctag

SEQ ID NO: 2874 - RNA, 20 nt, synthetic construct
  source 1..20: mol_type = other RNA
agaccatcaggaagatgcta

SEQ ID NO: 2875 - RNA, 20 nt, synthetic construct
  source 1..20: mol_type = other RNA
aagaccatcaggaagatgct

SEQ ID NO: 2876 - RNA, 20 nt, synthetic construct
  source 1..20: mol_type = other RNA
tcctgatggtctttctgcct

SEQ ID NO: 2877 - RNA, 20 nt, synthetic construct
  source 1..20: mol_type = other RNA
cctgatggtctttctgcctt

SEQ ID NO: 2878 - RNA, 20 nt, synthetic construct
  source 1..20: mol_type = other RNA
ctgatggtctttctgccttg

SEQ ID NO: 2879 - RNA, 20 nt, synthetic construct
  source 1..20: mol_type = other RNA
cccaaggcagaaagaccatc

SEQ ID NO: 2880 - RNA, 20 nt, synthetic construct
  source 1..20: mol_type = other RNA
ctttctgccttggggtgaag

SEQ ID NO: 2881 - RNA, 20 nt, synthetic construct
  source 1..20: mol_type = other RNA
ccttggggtgaagaggcatt

SEQ ID NO: 2882 - RNA, 20 nt, synthetic construct
  source 1..20: mol_type = other RNA
cttggggtgaagaggcattt

SEQ ID NO: 2883 - RNA, 20 nt, synthetic construct
  source 1..20: mol_type = other RNA
ttggggtgaagaggcatttg

SEQ ID NO: 2884 - RNA, 20 nt, synthetic construct
  source 1..20: mol_type = other RNA
tggggtgaagaggcatttgg

SEQ ID NO: 2885 - RNA, 20 nt, synthetic construct
  source 1..20: mol_type = other RNA
ccaaatgcctcttcacccca

SEQ ID NO: 2886 - RNA, 20 nt, synthetic construct
  source 1..20: mol_type = other RNA
atttgggggaattgccatct

SEQ ID NO: 2887 - RNA, 20 nt, synthetic construct
  source 1..20: mol_type = other RNA
tttgggggaattgccatctt

SEQ ID NO: 2888 - RNA, 20 nt, synthetic construct
  source 1..20: mol_type = other RNA
gggggaattgccatcttggg

SEQ ID NO: 2889 - RNA, 20 nt, synthetic construct
  source 1..20: mol_type = other RNA
tactgcttttcctcccaaga

SEQ ID NO: 2890 - RNA, 20 nt, synthetic construct
  source 1..20: mol_type = other RNA
cctttcactttcagactgaa

SEQ ID NO: 2891 - RNA, 20 nt, synthetic construct
  source 1..20: mol_type = other RNA
cctttcagtctgaaagtgaa

SEQ ID NO: 2892 - RNA, 20 nt, synthetic construct
  source 1..20: mol_type = other RNA
ctttcagactgaaaggctcc

SEQ ID NO: 2893 - RNA, 20 nt, synthetic construct
  source 1..20: mol_type = other RNA
tttcagactgaaaggctcct

SEQ ID NO: 2894 - RNA, 20 nt, synthetic construct
  source 1..20: mol_type = other RNA
ttcagactgaaaggctcctg

SEQ ID NO: 2895 - RNA, 20 nt, synthetic construct
  source 1..20: mol_type = other RNA
ctggggaacttgcttcactc

SEQ ID NO: 2896 - RNA, 20 nt, synthetic construct
  source 1..20: mol_type = other RNA
cggagtgaagcaagttcccc

SEQ ID NO: 2897 - RNA, 20 nt, synthetic construct
  source 1..20: mol_type = other RNA
cgctttctgtcccatgctga

SEQ ID NO: 2898 - RNA, 20 nt, synthetic construct
  source 1..20: mol_type = other RNA
cagcatgggacagaaagcgc

SEQ ID NO: 2899 - RNA, 20 nt, synthetic construct
  source 1..20: mol_type = other RNA
ttctgtcccatgctgaaggc

SEQ ID NO: 2900 - RNA, 20 nt, synthetic construct
  source 1..20: mol_type = other RNA
gcgactccagccttcagcat

SEQ ID NO: 2901 - RNA, 20 nt, synthetic construct
  source 1..20: mol_type = other RNA
ggcgactccagccttcagca

SEQ ID NO: 2902 - RNA, 20 nt, synthetic construct
  source 1..20: mol_type = other RNA
aaaggcaaaggggaaggggc

SEQ ID NO: 2903 - RNA, 20 nt, synthetic construct
  source 1..20: mol_type = other RNA
ccttcccctttgcctttctc

SEQ ID NO: 2904 - RNA, 20 nt, synthetic construct
  source 1..20: mol_type = other RNA
tgagaaaggcaaaggggaag

SEQ ID NO: 2905 - RNA, 20 nt, synthetic construct
  source 1..20: mol_type = other RNA
ctgagaaaggcaaaggggaa

SEQ ID NO: 2906 - RNA, 20 nt, synthetic construct
  source 1..20: mol_type = other RNA
cctgagaaaggcaaagggga

SEQ ID NO: 2907 - RNA, 20 nt, synthetic construct
  source 1..20: mol_type = other RNA
ggggcctgagaaaggcaaag

SEQ ID NO: 2908 - RNA, 20 nt, synthetic construct
  source 1..20: mol_type = other RNA
tggggcctgagaaaggcaaa

SEQ ID NO: 2909 - RNA, 20 nt, synthetic construct
  source 1..20: mol_type = other RNA
ctggggcctgagaaaggcaa

SEQ ID NO: 2910 - RNA, 20 nt, synthetic construct
  source 1..20: mol_type = other RNA
ttctcaggccccagtccctg

SEQ ID NO: 2911 - RNA, 20 nt, synthetic construct
  source 1..20: mol_type = other RNA
cagggactggggcctgagaa

SEQ ID NO: 2912 - RNA, 20 nt, synthetic construct
  source 1..20: mol_type = other RNA
cagtccctgaggtgtgtgtg

SEQ ID NO: 2913 - RNA, 20 nt, synthetic construct
  source 1..20: mol_type = other RNA
cacacacacctcagggactg

SEQ ID NO: 2914 - RNA, 20 nt, synthetic construct
  source 1..20: mol_type = other RNA
tcacacacacctcagggact

SEQ ID NO: 2915 - RNA, 20 nt, synthetic construct
  source 1..20: mol_type = other RNA
ctcacacacacctcagggac

SEQ ID NO: 2916 - RNA, 20 nt, synthetic construct
  source 1..20: mol_type = other RNA
cagtcctcacacacacctca

SEQ ID NO: 2917 - RNA, 20 nt, synthetic construct
  source 1..20: mol_type = other RNA
tcagtcctcacacacacctc

SEQ ID NO: 2918 - RNA, 20 nt, synthetic construct
  source 1..20: mol_type = other RNA
gtgaggactgaactttaatc

SEQ ID NO: 2919 - RNA, 20 nt, synthetic construct
  source 1..20: mol_type = other RNA
aactttaatccggaacaatc

SEQ ID NO: 2920 - RNA, 20 nt, synthetic construct
  source 1..20: mol_type = other RNA
ggaacaatctggtttctcct

SEQ ID NO: 2921 - RNA, 20 nt, synthetic construct
  source 1..20: mol_type = other RNA
gaggagaaaccagattgttc

SEQ ID NO: 2922 - RNA, 20 nt, synthetic construct
  source 1..20: mol_type = other RNA
ttctcctcggtcagcccagc

SEQ ID NO: 2923 - RNA, 20 nt, synthetic construct
  source 1..20: mol_type = other RNA
agcaccggctgggctgaccg

SEQ ID NO: 2924 - RNA, 20 nt, synthetic construct
  source 1..20: mol_type = other RNA
gggcgggggaagcaccggct

SEQ ID NO: 2925 - RNA, 20 nt, synthetic construct
  source 1..20: mol_type = other RNA
ggggcgggggaagcaccggc

SEQ ID NO: 2926 - RNA, 20 nt, synthetic construct
  source 1..20: mol_type = other RNA
ggtgggggcgggggaagcac

SEQ ID NO: 2927 - RNA, 20 nt, synthetic construct
  source 1..20: mol_type = other RNA
gcccccacccacgctgcaag

SEQ ID NO: 2928 - RNA, 20 nt, synthetic construct
  source 1..20: mol_type = other RNA
ttgcagcgtgggtgggggcg

SEQ ID NO: 2929 - RNA, 20 nt, synthetic construct
  source 1..20: mol_type = other RNA
cttgcagcgtgggtgggggc

SEQ ID NO: 2930 - RNA, 20 nt, synthetic construct
  source 1..20: mol_type = other RNA
tcttgcagcgtgggtggggg

SEQ ID NO: 2931 - RNA, 20 nt, synthetic construct
  source 1..20: mol_type = other RNA
cacccacgctgcaagaggcg

SEQ ID NO: 2932 - RNA, 20 nt, synthetic construct
  source 1..20: mol_type = other RNA
acccacgctgcaagaggcga

SEQ ID NO: 2933 - RNA, 20 nt, synthetic construct
  source 1..20: mol_type = other RNA
cgcctcttgcagcgtgggtg

SEQ ID NO: 2934 - RNA, 20 nt, synthetic construct
  source 1..20: mol_type = other RNA
tcgcctcttgcagcgtgggt

SEQ ID NO: 2935 - RNA, 20 nt, synthetic construct
  source 1..20: mol_type = other RNA
cacgctgcaagaggcgaggg

SEQ ID NO: 2936 - RNA, 20 nt, synthetic construct
  source 1..20: mol_type = other RNA
acgctgcaagaggcgaggga

SEQ ID NO: 2937 - RNA, 20 nt, synthetic construct
  source 1..20: mol_type = other RNA
cgctgcaagaggcgagggag

SEQ ID NO: 2938 - RNA, 20 nt, synthetic construct
  source 1..20: mol_type = other RNA
tccctcgcctcttgcagcgt

SEQ ID NO: 2939 - RNA, 20 nt, synthetic construct
  source 1..20: mol_type = other RNA
ctccctcgcctcttgcagcg

SEQ ID NO: 2940 - RNA, 20 nt, synthetic construct
  source 1..20: mol_type = other RNA
tgcaagaggcgagggagggg

SEQ ID NO: 2941 - RNA, 20 nt, synthetic construct
  source 1..20: mol_type = other RNA
catgtgtacatctgtccctg

SEQ ID NO: 2942 - RNA, 20 nt, synthetic construct
  source 1..20: mol_type = other RNA
tacatctgtccctgtggtcc

SEQ ID NO: 2943 - RNA, 20 nt, synthetic construct
  source 1..20: mol_type = other RNA
ctgtggtcccggcagctcgc

SEQ ID NO: 2944 - RNA, 20 nt, synthetic construct
  source 1..20: mol_type = other RNA
tgtggtcccggcagctcgcc

SEQ ID NO: 2945 - RNA, 20 nt, synthetic construct
  source 1..20: mol_type = other RNA
ggcgagctgccgggaccaca

SEQ ID NO: 2946 - RNA, 20 nt, synthetic construct
  source 1..20: mol_type = other RNA
ggtcccggcagctcgccggg

SEQ ID NO: 2947 - RNA, 20 nt, synthetic construct
  source 1..20: mol_type = other RNA
gtcccggcagctcgccgggt

SEQ ID NO: 2948 - RNA, 20 nt, synthetic construct
  source 1..20: mol_type = other RNA
tcccggcagctcgccgggtg

SEQ ID NO: 2949 - RNA, 20 nt, synthetic construct
  source 1..20: mol_type = other RNA
ggcagctcgccgggtggggc

SEQ ID NO: 2950 - RNA, 20 nt, synthetic construct
  source 1..20: mol_type = other RNA
gccccacccggcgagctgcc

SEQ ID NO: 2951 - RNA, 20 nt, synthetic construct
  source 1..20: mol_type = other RNA
tgccccacccggcgagctgc

SEQ ID NO: 2952 - RNA, 20 nt, synthetic construct
  source 1..20: mol_type = other RNA
cttctggttcctgccccacc

SEQ ID NO: 2953 - RNA, 20 nt, synthetic construct
  source 1..20: mol_type = other RNA
ggcaggaaccagaagtctcg

SEQ ID NO: 2954 - RNA, 20 nt, synthetic construct
  source 1..20: mol_type = other RNA
gaaaggtgccgcgagacttc

SEQ ID NO: 2955 - RNA, 20 nt, synthetic construct
  source 1..20: mol_type = other RNA
ggcacctttcccccaccccc

SEQ ID NO: 2956 - RNA, 20 nt, synthetic construct
  source 1..20: mol_type = other RNA
cacacctgggggtgggggaa

SEQ ID NO: 2957 - RNA, 20 nt, synthetic construct
  source 1..20: mol_type = other RNA
acccccaggtgtgttgcaag

SEQ ID NO: 2958 - RNA, 20 nt, synthetic construct
  source 1..20: mol_type = other RNA
ttgcaacacacctgggggtg

SEQ ID NO: 2959 - RNA, 20 nt, synthetic construct
  source 1..20: mol_type = other RNA
cttgcaacacacctgggggt

SEQ ID NO: 2960 - RNA, 20 nt, synthetic construct
  source 1..20: mol_type = other RNA
acttgcaacacacctggggg

SEQ ID NO: 2961 - RNA, 20 nt, synthetic construct
  source 1..20: mol_type = other RNA
caggtgtgttgcaagtggcc

SEQ ID NO: 2962 - RNA, 20 nt, synthetic construct
  source 1..20: mol_type = other RNA
gccacttgcaacacacctgg

SEQ ID NO: 2963 - RNA, 20 nt, synthetic construct
  source 1..20: mol_type = other RNA
ggccacttgcaacacacctg

SEQ ID NO: 2964 - RNA, 20 nt, synthetic construct
  source 1..20: mol_type = other RNA
aggccacttgcaacacacct

SEQ ID NO: 2965 - RNA, 20 nt, synthetic construct
  source 1..20: mol_type = other RNA
caggccacttgcaacacacc

SEQ ID NO: 2966 - RNA, 20 nt, synthetic construct
  source 1..20: mol_type = other RNA
gtgagtggtgcctctggagg

SEQ ID NO: 2967 - RNA, 20 nt, synthetic construct
  source 1..20: mol_type = other RNA
tgagtggtgcctctggaggt

SEQ ID NO: 2968 - RNA, 20 nt, synthetic construct
  source 1..20: mol_type = other RNA
ggcagcacccccagcctcca

SEQ ID NO: 2969 - RNA, 20 nt, synthetic construct
  source 1..20: mol_type = other RNA
gcagcacccccagcctccaa

SEQ ID NO: 2970 - RNA, 20 nt, synthetic construct
  source 1..20: mol_type = other RNA
cccagcctccaagggccgtc

SEQ ID NO: 2971 - RNA, 20 nt, synthetic construct
  source 1..20: mol_type = other RNA
tgacggcccttggaggctgg

SEQ ID NO: 2972 - RNA, 20 nt, synthetic construct
  source 1..20: mol_type = other RNA
gcctccaagggccgtcaggc

SEQ ID NO: 2973 - RNA, 20 nt, synthetic construct
  source 1..20: mol_type = other RNA
cctccaagggccgtcaggct

SEQ ID NO: 2974 - RNA, 20 nt, synthetic construct
  source 1..20: mol_type = other RNA
gcctgacggcccttggaggc

SEQ ID NO: 2975 - RNA, 20 nt, synthetic construct
  source 1..20: mol_type = other RNA
cccagcctgacggcccttgg

SEQ ID NO: 2976 - RNA, 20 nt, synthetic construct
  source 1..20: mol_type = other RNA
agggccgtcaggctgggctt

SEQ ID NO: 2977 - RNA, 20 nt, synthetic construct
  source 1..20: mol_type = other RNA
gggccgtcaggctgggcttt

SEQ ID NO: 2978 - RNA, 20 nt, synthetic construct
  source 1..20: mol_type = other RNA
aagcccagcctgacggccct

SEQ ID NO: 2979 - RNA, 20 nt, synthetic construct
  source 1..20: mol_type = other RNA
tggcccaaagcccagcctga

SEQ ID NO: 2980 - RNA, 20 nt, synthetic construct
  source 1..20: mol_type = other RNA
gctgggaatgggctgctcaa

SEQ ID NO: 2981 - RNA, 20 nt, synthetic construct
  source 1..20: mol_type = other RNA
gcagcccattcccagccctg

SEQ ID NO: 2982 - RNA, 20 nt, synthetic construct
  source 1..20: mol_type = other RNA
tgggcctcagggctgggaat

SEQ ID NO: 2983 - RNA, 20 nt, synthetic construct
  source 1..20: mol_type = other RNA
gtgggcctcagggctgggaa

SEQ ID NO: 2984 - RNA, 20 nt, synthetic construct
  source 1..20: mol_type = other RNA
agccctgaggcccaccccag

SEQ ID NO: 2985 - RNA, 20 nt, synthetic construct
  source 1..20: mol_type = other RNA
ctggggtgggcctcagggct

SEQ ID NO: 2986 - RNA, 20 nt, synthetic construct
  source 1..20: mol_type = other RNA
tctggggtgggcctcagggc

SEQ ID NO: 2987 - RNA, 20 nt, synthetic construct
  source 1..20: mol_type = other RNA
ctgaggcccaccccagaggc

SEQ ID NO: 2988 - RNA, 20 nt, synthetic construct
  source 1..20: mol_type = other RNA
agcctctggggtgggcctca

SEQ ID NO: 2989 - RNA, 20 nt, synthetic construct
  source 1..20: mol_type = other RNA
cagcctctggggtgggcctc

SEQ ID NO: 2990 - RNA, 20 nt, synthetic construct
  source 1..20: mol_type = other RNA
ccaccccagaggctggacag

SEQ ID NO: 2991 - RNA, 20 nt, synthetic construct
  source 1..20: mol_type = other RNA
caccccagaggctggacaga

SEQ ID NO: 2992 - RNA, 20 nt, synthetic construct
  source 1..20: mol_type = other RNA
cccagaggctggacagaggg

SEQ ID NO: 2993 - RNA, 20 nt, synthetic construct
  source 1..20: mol_type = other RNA
cctctgtccagcctctgggg

SEQ ID NO: 2994 - RNA, 20 nt, synthetic construct
  source 1..20: mol_type = other RNA
ctccctctgtccagcctctg

SEQ ID NO: 2995 - RNA, 20 nt, synthetic construct
  source 1..20: mol_type = other RNA
cctccctctgtccagcctct

SEQ ID NO: 2996 - RNA, 20 nt, synthetic construct
  source 1..20: mol_type = other RNA
tcctccctctgtccagcctc

SEQ ID NO: 2997 - RNA, 20 nt, synthetic construct
  source 1..20: mol_type = other RNA
gacagagggaggattcaagt

SEQ ID NO: 2998 - RNA, 20 nt, synthetic construct
  source 1..20: mol_type = other RNA
acagagggaggattcaagtc

SEQ ID NO: 2999 - RNA, 20 nt, synthetic construct
  source 1..20: mol_type = other RNA
agggaggattcaagtcggga

SEQ ID NO: 3000 - RNA, 20 nt, synthetic construct
  source 1..20: mol_type = other RNA
ccacaaaccaaagatactgt

SEQ ID NO: 3001 - RNA, 20 nt, synthetic construct
  source 1..20: mol_type = other RNA
ctacagtatctttggtttgt

SEQ ID NO: 3002 - RNA, 20 nt, synthetic construct
  source 1..20: mol_type = other RNA
aaccaaagatactgtaggat

SEQ ID NO: 3003 - RNA, 20 nt, synthetic construct
  source 1..20: mol_type = other RNA
agatactgtaggattggttc

SEQ ID NO: 3004 - RNA, 20 nt, synthetic construct
  source 1..20: mol_type = other RNA
aaccaatcctacagtatctt

SEQ ID NO: 3005 - RNA, 20 nt, synthetic construct
  source 1..20: mol_type = other RNA
gacagctagaggtgctgcat

SEQ ID NO: 3006 - RNA, 20 nt, synthetic construct
  source 1..20: mol_type = other RNA
agacagctagaggtgctgca

SEQ ID NO: 3007 - RNA, 20 nt, synthetic construct
  source 1..20: mol_type = other RNA
cctctagctgtctgcctcag

SEQ ID NO: 3008 - RNA, 20 nt, synthetic construct
  source 1..20: mol_type = other RNA
ctctagctgtctgcctcagt

SEQ ID NO: 3009 - RNA, 20 nt, synthetic construct
  source 1..20: mol_type = other RNA
ccactgaggcagacagctag

SEQ ID NO: 3010 - RNA, 20 nt, synthetic construct
  source 1..20: mol_type = other RNA
tgatcgcttctgacccactg

SEQ ID NO: 3011 - RNA, 20 nt, synthetic construct
  source 1..20: mol_type = other RNA
agatacaatgtgtatcaaca

SEQ ID NO: 3012 - RNA, 20 nt, synthetic construct
  source 1..20: mol_type = other RNA
gagatacaatgtgtatcaac

SEQ ID NO: 3013 - RNA, 20 nt, synthetic construct
  source 1..20: mol_type = other RNA
cattgtatctctgtagttta

SEQ ID NO: 3014 - RNA, 20 nt, synthetic construct
  source 1..20: mol_type = other RNA
gtagtttaaggagacgctgc

SEQ ID NO: 3015 - RNA, 20 nt, synthetic construct
  source 1..20: mol_type = other RNA
taaggagacgctgccggtaa

SEQ ID NO: 3016 - RNA, 20 nt, synthetic construct
  source 1..20: mol_type = other RNA
gacgctgccggtaacggcgt

SEQ ID NO: 3017 - RNA, 20 nt, synthetic construct
  source 1..20: mol_type = other RNA
ccggtaacggcgtcggtccg

SEQ ID NO: 3018 - RNA, 20 nt, synthetic construct
  source 1..20: mol_type = other RNA
ccacggaccgacgccgttac

SEQ ID NO: 3019 - RNA, 20 nt, synthetic construct
  source 1..20: mol_type = other RNA
acggcgtcggtccgtggctg

SEQ ID NO: 3020 - RNA, 20 nt, synthetic construct
  source 1..20: mol_type = other RNA
gacggtttgggcctcagcca

SEQ ID NO: 3021 - RNA, 20 nt, synthetic construct
  source 1..20: mol_type = other RNA
caaaccgtcttttctctcag

SEQ ID NO: 3022 - RNA, 20 nt, synthetic construct
  source 1..20: mol_type = other RNA
aaaccgtcttttctctcaga

SEQ ID NO: 3023 - RNA, 20 nt, synthetic construct
  source 1..20: mol_type = other RNA
tctgagagaaaagacggttt

SEQ ID NO: 3024 - RNA, 20 nt, synthetic construct
  source 1..20: mol_type = other RNA
ccgtcttttctctcagaggg

SEQ ID NO: 3025 - RNA, 20 nt, synthetic construct
  source 1..20: mol_type = other RNA
cgtcttttctctcagagggt

SEQ ID NO: 3026 - RNA, 20 nt, synthetic construct
  source 1..20: mol_type = other RNA
gtcttttctctcagagggtg

SEQ ID NO: 3027 - RNA, 20 nt, synthetic construct
  source 1..20: mol_type = other RNA
ttttctctcagagggtgggg

SEQ ID NO: 3028 - RNA, 20 nt, synthetic construct
  source 1..20: mol_type = other RNA
tttctctcagagggtgggga

SEQ ID NO: 3029 - RNA, 20 nt, synthetic construct
  source 1..20: mol_type = other RNA
ctctcagagggtggggaggg

SEQ ID NO: 3030 - RNA, 20 nt, synthetic construct
  source 1..20: mol_type = other RNA
tcagagggtggggagggagg

SEQ ID NO: 3031 - RNA, 20 nt, synthetic construct
  source 1..20: mol_type = other RNA
cagagggtggggagggaggt

SEQ ID NO: 3032 - RNA, 20 nt, synthetic construct
  source 1..20: mol_type = other RNA
agagggtggggagggaggtg

SEQ ID NO: 3033 - RNA, 20 nt, synthetic construct
  source 1..20: mol_type = other RNA
gagggtggggagggaggtgg

SEQ ID NO: 3034 - RNA, 20 nt, synthetic construct
  source 1..20: mol_type = other RNA
gagggaggtgggggcagcag

SEQ ID NO: 3035 - RNA, 20 nt, synthetic construct
  source 1..20: mol_type = other RNA
aggtgggggcagcagaggcc

SEQ ID NO: 3036 - RNA, 20 nt, synthetic construct
  source 1..20: mol_type = other RNA
ggtgggggcagcagaggcct

SEQ ID NO: 3037 - RNA, 20 nt, synthetic construct
  source 1..20: mol_type = other RNA
ggggcagcagaggcctgggc

SEQ ID NO: 3038 - RNA, 20 nt, synthetic construct
  source 1..20: mol_type = other RNA
gggcagcagaggcctgggct

SEQ ID NO: 3039 - RNA, 20 nt, synthetic construct
  source 1..20: mol_type = other RNA
gtgcacagggcacccagccc

SEQ ID NO: 3040 - RNA, 20 nt, synthetic construct
  source 1..20: mol_type = other RNA
gaagtggggtggcgtgcaca

SEQ ID NO: 3041 - RNA, 20 nt, synthetic construct
  source 1..20: mol_type = other RNA
ggaagtggggtggcgtgcac

SEQ ID NO: 3042 - RNA, 20 nt, synthetic construct
  source 1..20: mol_type = other RNA
ccccacttccgccctacccc

SEQ ID NO: 3043 - RNA, 20 nt, synthetic construct
  source 1..20: mol_type = other RNA
cccacttccgccctacccct

SEQ ID NO: 3044 - RNA, 20 nt, synthetic construct
  source 1..20: mol_type = other RNA
ggggtagggcggaagtgggg

SEQ ID NO: 3045 - RNA, 20 nt, synthetic construct
  source 1..20: mol_type = other RNA
ccaggggtagggcggaagtg

SEQ ID NO: 3046 - RNA, 20 nt, synthetic construct
  source 1..20: mol_type = other RNA
cccaggggtagggcggaagt

SEQ ID NO: 3047 - RNA, 20 nt, synthetic construct
  source 1..20: mol_type = other RNA
tcccaggggtagggcggaag

SEQ ID NO: 3048 - RNA, 20 nt, synthetic construct
  source 1..20: mol_type = other RNA
ccgccctacccctgggacgt

SEQ ID NO: 3049 - RNA, 20 nt, synthetic construct
  source 1..20: mol_type = other RNA
ccaacgtcccaggggtaggg

SEQ ID NO: 3050 - RNA, 20 nt, synthetic construct
  source 1..20: mol_type = other RNA
tacccctgggacgttggcct

SEQ ID NO: 3051 - RNA, 20 nt, synthetic construct
  source 1..20: mol_type = other RNA
aggccaacgtcccaggggta

SEQ ID NO: 3052 - RNA, 20 nt, synthetic construct
  source 1..20: mol_type = other RNA
aaggccaacgtcccaggggt

SEQ ID NO: 3053 - RNA, 20 nt, synthetic construct
  source 1..20: mol_type = other RNA
cctgggacgttggccttggc

SEQ ID NO: 3054 - RNA, 20 nt, synthetic construct
  source 1..20: mol_type = other RNA
agccaaggccaacgtcccag

SEQ ID NO: 3055 - RNA, 20 nt, synthetic construct
  source 1..20: mol_type = other RNA
cagccaaggccaacgtccca

SEQ ID NO: 3056 - RNA, 20 nt, synthetic construct
  source 1..20: mol_type = other RNA
ccagccaaggccaacgtccc

SEQ ID NO: 3057 - RNA, 20 nt, synthetic construct
  source 1..20: mol_type = other RNA
gttggccttggctggctagt

SEQ ID NO: 3058 - RNA, 20 nt, synthetic construct
  source 1..20: mol_type = other RNA
ttggccttggctggctagtt

SEQ ID NO: 3059 - RNA, 20 nt, synthetic construct
  source 1..20: mol_type = other RNA
ggtgcccaactagccagcca

SEQ ID NO: 3060 - RNA, 20 nt, synthetic construct
  source 1..20: mol_type = other RNA
caccgtgtgcctgccctcca

SEQ ID NO: 3061 - RNA, 20 nt, synthetic construct
  source 1..20: mol_type = other RNA
accgtgtgcctgccctccaa

SEQ ID NO: 3062 - RNA, 20 nt, synthetic construct
  source 1..20: mol_type = other RNA
gcccttggagggcaggcaca

SEQ ID NO: 3063 - RNA, 20 nt, synthetic construct
  source 1..20: mol_type = other RNA
agaggaggcccttggagggc

SEQ ID NO: 3064 - RNA, 20 nt, synthetic construct
  source 1..20: mol_type = other RNA
gcgtagaggaggcccttgga

SEQ ID NO: 3065 - RNA, 20 nt, synthetic construct
  source 1..20: mol_type = other RNA
ggcgtagaggaggcccttgg

SEQ ID NO: 3066 - RNA, 20 nt, synthetic construct
  source 1..20: mol_type = other RNA
gggcctcctctacgccaatg

SEQ ID NO: 3067 - RNA, 20 nt, synthetic construct
  source 1..20: mol_type = other RNA
attggcgtagaggaggccct

SEQ ID NO: 3068 - RNA, 20 nt, synthetic construct
  source 1..20: mol_type = other RNA
aggcctcattggcgtagagg

SEQ ID NO: 3069 - RNA, 20 nt, synthetic construct
  source 1..20: mol_type = other RNA
atgaggcctcattggcgtag

SEQ ID NO: 3070 - RNA, 20 nt, synthetic construct
  source 1..20: mol_type = other RNA
gagcacagatgaggcctcat

SEQ ID NO: 3071 - RNA, 20 nt, synthetic construct
  source 1..20: mol_type = other RNA
ggcctcatctgtgctctcgc

SEQ ID NO: 3072 - RNA, 20 nt, synthetic construct
  source 1..20: mol_type = other RNA
gcctcatctgtgctctcgct

SEQ ID NO: 3073 - RNA, 20 nt, synthetic construct
  source 1..20: mol_type = other RNA
gcccagcgagagcacagatg

SEQ ID NO: 3074 - RNA, 20 nt, synthetic construct
  source 1..20: mol_type = other RNA
ctgtgctctcgctgggcacg

SEQ ID NO: 3075 - RNA, 20 nt, synthetic construct
  source 1..20: mol_type = other RNA
aatagagtggggcagaaggt

SEQ ID NO: 3076 - RNA, 20 nt, synthetic construct
  source 1..20: mol_type = other RNA
gaatagagtggggcagaagg

SEQ ID NO: 3077 - RNA, 20 nt, synthetic construct
  source 1..20: mol_type = other RNA
aaggaatagagtggggcaga

SEQ ID NO: 3078 - RNA, 20 nt, synthetic construct
  source 1..20: mol_type = other RNA
gcaggataaggaatagagtg

SEQ ID NO: 3079 - RNA, 20 nt, synthetic construct
  source 1..20: mol_type = other RNA
agcaggataaggaatagagt

SEQ ID NO: 3080 - RNA, 20 nt, synthetic construct
  source 1..20: mol_type = other RNA
cagcaggataaggaatagag

SEQ ID NO: 3081 - RNA, 20 nt, synthetic construct
  source 1..20: mol_type = other RNA
ccttatcctgctgcccctgt

SEQ ID NO: 3082 - RNA, 20 nt, synthetic construct
  source 1..20: mol_type = other RNA
cttatcctgctgcccctgta

SEQ ID NO: 3083 - RNA, 20 nt, synthetic construct
  source 1..20: mol_type = other RNA
ttatcctgctgcccctgtag

SEQ ID NO: 3084 - RNA, 20 nt, synthetic construct
  source 1..20: mol_type = other RNA
cctacaggggcagcaggata

SEQ ID NO: 3085 - RNA, 20 nt, synthetic construct
  source 1..20: mol_type = other RNA
tgctgcccctgtaggggtca

SEQ ID NO: 3086 - RNA, 20 nt, synthetic construct
  source 1..20: mol_type = other RNA
gctgcccctgtaggggtcaa

SEQ ID NO: 3087 - RNA, 20 nt, synthetic construct
  source 1..20: mol_type = other RNA
ttgacccctacaggggcagc

SEQ ID NO: 3088 - RNA, 20 nt, synthetic construct
  source 1..20: mol_type = other RNA
agggcccttgacccctacag

SEQ ID NO: 3089 - RNA, 20 nt, synthetic construct
  source 1..20: mol_type = other RNA
gagggcccttgacccctaca

SEQ ID NO: 3090 - RNA, 20 nt, synthetic construct
  source 1..20: mol_type = other RNA
ggagggcccttgacccctac

SEQ ID NO: 3091 - RNA, 20 nt, synthetic construct
  source 1..20: mol_type = other RNA
aagaagagggtgtagacgga

SEQ ID NO: 3092 - RNA, 20 nt, synthetic construct
  source 1..20: mol_type = other RNA
gaagaagagggtgtagacgg

SEQ ID NO: 3093 - RNA, 20 nt, synthetic construct
  source 1..20: mol_type = other RNA
ggagaagaagagggtgtaga

SEQ ID NO: 3094 - RNA, 20 nt, synthetic construct
  source 1..20: mol_type = other RNA
aaggatggaggagaagaaga

SEQ ID NO: 3095 - RNA, 20 nt, synthetic construct
  source 1..20: mol_type = other RNA
aaaggatggaggagaagaag

SEQ ID NO: 3096 - RNA, 20 nt, synthetic construct
  source 1..20: mol_type = other RNA
tgactctgaataaaggatgg

SEQ ID NO: 3097 - RNA, 20 nt, synthetic construct
  source 1..20: mol_type = other RNA
agatgactctgaataaagga

SEQ ID NO: 3098 - RNA, 20 nt, synthetic construct
  source 1..20: mol_type = other RNA
ggcgagatgactctgaataa

SEQ ID NO: 3099 - RNA, 20 nt, synthetic construct
  source 1..20: mol_type = other RNA
agtcatctcgcccttcccca

SEQ ID NO: 3100 - RNA, 20 nt, synthetic construct
  source 1..20: mol_type = other RNA
gtcatctcgcccttccccat

SEQ ID NO: 3101 - RNA, 20 nt, synthetic construct
  source 1..20: mol_type = other RNA
atctcgcccttccccatggg

SEQ ID NO: 3102 - RNA, 20 nt, synthetic construct
  source 1..20: mol_type = other RNA
tctcgcccttccccatgggt

SEQ ID NO: 3103 - RNA, 20 nt, synthetic construct
  source 1..20: mol_type = other RNA
ctcgcccttccccatgggtg

SEQ ID NO: 3104 - RNA, 20 nt, synthetic construct
  source 1..20: mol_type = other RNA
tcgcccttccccatgggtgg

SEQ ID NO: 3105 - RNA, 20 nt, synthetic construct
  source 1..20: mol_type = other RNA
gttcccccacccatggggaa

SEQ ID NO: 3106 - RNA, 20 nt, synthetic construct
  source 1..20: mol_type = other RNA
ggttcccccacccatgggga

SEQ ID NO: 3107 - RNA, 20 nt, synthetic construct
  source 1..20: mol_type = other RNA
cacaggttcccccacccatg

SEQ ID NO: 3108 - RNA, 20 nt, synthetic construct
  source 1..20: mol_type = other RNA
acacaggttcccccacccat

SEQ ID NO: 3109 - RNA, 20 nt, synthetic construct
  source 1..20: mol_type = other RNA
aacacaggttcccccaccca

SEQ ID NO: 3110 - RNA, 20 nt, synthetic construct
  source 1..20: mol_type = other RNA
atgtgcacacaaacaaacac

SEQ ID NO: 3111 - RNA, 20 nt, synthetic construct
  source 1..20: mol_type = other RNA
ttgatgtgttacaggaggta

SEQ ID NO: 3112 - RNA, 20 nt, synthetic construct
  source 1..20: mol_type = other RNA
ctttattgatgtgttacagg

SEQ ID NO: 3113 - RNA, 20 nt, synthetic construct
  source 1..20: mol_type = other RNA
gtactttattgatgtgttac

SEQ ID NO: 3114 - RNA, 20 nt, synthetic construct
  source 1..20: mol_type = other RNA
aagacaatcacctcttgaaa

SEQ ID NO: 3115 - RNA, 20 nt, synthetic construct
  source 1..20: mol_type = other RNA
aaagacaatcacctcttgaa

SEQ ID NO: 3116 - DNA, 28 bp, synthetic construct
  source 1..28: mol_type = other DNA
agcaaaactatacaatatcccacttagg

SEQ ID NO: 3117 - DNA, 28 bp, synthetic construct
  source 1..28: mol_type = other DNA
gcaaaactatacaatatcccacttaggg

SEQ ID NO: 3118 - DNA, 28 bp, synthetic construct
  source 1..28: mol_type = other DNA
atatcccacttagggatgcatacagagg

SEQ ID NO: 3119 - DNA, 28 bp, synthetic construct
  source 1..28: mol_type = other DNA
tcccacttagggatgcatacagaggtgg

SEQ ID NO: 3120 - DNA, 28 bp, synthetic construct
  source 1..28: mol_type = other DNA
accacctctgtatgcatccctaagtggg

SEQ ID NO: 3121 - DNA, 28 bp, synthetic construct
  source 1..28: mol_type = other DNA
taccacctctgtatgcatccctaagtgg

SEQ ID NO: 3122 - DNA, 28 bp, synthetic construct
  source 1..28: mol_type = other DNA
agaatgactagcacaattaaagttcagg

SEQ ID NO: 3123 - DNA, 28 bp, synthetic construct
  source 1..28: mol_type = other DNA
ttaaagttcaggaaactagttcttcagg

SEQ ID NO: 3124 - DNA, 28 bp, synthetic construct
  source 1..28: mol_type = other DNA
ttcaggaaactagttcttcaggatgtgg

SEQ ID NO: 3125 - DNA, 28 bp, synthetic construct
  source 1..28: mol_type = other DNA
tcaggaaactagttcttcaggatgtggg

SEQ ID NO: 3126 - DNA, 28 bp, synthetic construct
  source 1..28: mol_type = other DNA
gaaactagttcttcaggatgtgggcagg

SEQ ID NO: 3127 - DNA, 28 bp, synthetic construct
  source 1..28: mol_type = other DNA
actagttcttcaggatgtgggcaggagg

SEQ ID NO: 3128 - DNA, 28 bp, synthetic construct
  source 1..28: mol_type = other DNA
tcaggatgtgggcaggaggctgtgatgg

SEQ ID NO: 3129 - DNA, 28 bp, synthetic construct
  source 1..28: mol_type = other DNA
caggatgtgggcaggaggctgtgatggg

SEQ ID NO: 3130 - DNA, 28 bp, synthetic construct
  source 1..28: mol_type = other DNA
aggatgtgggcaggaggctgtgatgggg

SEQ ID NO: 3131 - DNA, 28 bp, synthetic construct
  source 1..28: mol_type = other DNA
ggatgtgggcaggaggctgtgatggggg

SEQ ID NO: 3132 - DNA, 28 bp, synthetic construct
  source 1..28: mol_type = other DNA
aggaggctgtgatgggggcacccagagg

SEQ ID NO: 3133 - DNA, 28 bp, synthetic construct
  source 1..28: mol_type = other DNA
ggaggctgtgatgggggcacccagaggg

SEQ ID NO: 3134 - DNA, 28 bp, synthetic construct
  source 1..28: mol_type = other DNA
tgatgggggcacccagagggcctcaagg

SEQ ID NO: 3135 - DNA, 28 bp, synthetic construct
  source 1..28: mol_type = other DNA
gggcacccagagggcctcaaggtactgg

SEQ ID NO: 3136 - DNA, 28 bp, synthetic construct
  source 1..28: mol_type = other DNA
cagtgccagtaccttgaggccctctggg

SEQ ID NO: 3137 - DNA, 28 bp, synthetic construct
  source 1..28: mol_type = other DNA
ccagagggcctcaaggtactggcactgg

SEQ ID NO: 3138 - DNA, 28 bp, synthetic construct
  source 1..28: mol_type = other DNA
aaaatagaccagtgccagtaccttgagg

SEQ ID NO: 3139 - DNA, 28 bp, synthetic construct
  source 1..28: mol_type = other DNA
ctggcactggtctattttttaagttagg

SEQ ID NO: 3140 - DNA, 28 bp, synthetic construct
  source 1..28: mol_type = other DNA
ctggtctattttttaagttaggtgatgg

SEQ ID NO: 3141 - DNA, 28 bp, synthetic construct
  source 1..28: mol_type = other DNA
ttttttaagttaggtgatggatacatgg

SEQ ID NO: 3142 - DNA, 28 bp, synthetic construct
  source 1..28: mol_type = other DNA
agctgtacatgtacagttgtgtctatgg

SEQ ID NO: 3143 - DNA, 28 bp, synthetic construct
  source 1..28: mol_type = other DNA
tatttattataacactagcacttatagg

SEQ ID NO: 3144 - DNA, 28 bp, synthetic construct
  source 1..28: mol_type = other DNA
acttataggatacatgcctatgatgagg

SEQ ID NO: 3145 - DNA, 28 bp, synthetic construct
  source 1..28: mol_type = other DNA
tgttacattctctctacctcatcatagg

SEQ ID NO: 3146 - DNA, 28 bp, synthetic construct
  source 1..28: mol_type = other DNA
tgatgaggtagagagaatgtaacaaagg

SEQ ID NO: 3147 - DNA, 28 bp, synthetic construct
  source 1..28: mol_type = other DNA
aggtagagagaatgtaacaaaggactgg

SEQ ID NO: 3148 - DNA, 28 bp, synthetic construct
  source 1..28: mol_type = other DNA
caaaggactggcacatagtaagcactgg

SEQ ID NO: 3149 - DNA, 28 bp, synthetic construct
  source 1..28: mol_type = other DNA
aggactggcacatagtaagcactggtgg

SEQ ID NO: 3150 - DNA, 28 bp, synthetic construct
  source 1..28: mol_type = other DNA
gcacatagtaagcactggtggcatgtgg

SEQ ID NO: 3151 - DNA, 28 bp, synthetic construct
  source 1..28: mol_type = other DNA
gcatgtggctctgtcctccagcgtgtgg

SEQ ID NO: 3152 - DNA, 28 bp, synthetic construct
  source 1..28: mol_type = other DNA
catgtggctctgtcctccagcgtgtggg

SEQ ID NO: 3153 - DNA, 28 bp, synthetic construct
  source 1..28: mol_type = other DNA
agaaaacacagagcccacacgctggagg

SEQ ID NO: 3154 - DNA, 28 bp, synthetic construct
  source 1..28: mol_type = other DNA
gagagaaaacacagagcccacacgctgg

SEQ ID NO: 3155 - DNA, 28 bp, synthetic construct
  source 1..28: mol_type = other DNA
cgcacgcacacacacacacacacatagg

SEQ ID NO: 3156 - DNA, 28 bp, synthetic construct
  source 1..28: mol_type = other DNA
cacacacacacacacataggaagccagg

SEQ ID NO: 3157 - DNA, 28 bp, synthetic construct
  source 1..28: mol_type = other DNA
gagtgactgagggcagaggggagcctgg

SEQ ID NO: 3158 - DNA, 28 bp, synthetic construct
  source 1..28: mol_type = other DNA
gctcccctctgccctcagtcactcgtgg

SEQ ID NO: 3159 - DNA, 28 bp, synthetic construct
  source 1..28: mol_type = other DNA
gaaccacgagtgactgagggcagagggg

SEQ ID NO: 3160 - DNA, 28 bp, synthetic construct
  source 1..28: mol_type = other DNA
tgaaccacgagtgactgagggcagaggg

SEQ ID NO: 3161 - DNA, 28 bp, synthetic construct
  source 1..28: mol_type = other DNA
gtgaaccacgagtgactgagggcagagg

SEQ ID NO: 3162 - DNA, 28 bp, synthetic construct
  source 1..28: mol_type = other DNA
atttttgtgaaccacgagtgactgaggg

SEQ ID NO: 3163 - DNA, 28 bp, synthetic construct
  source 1..28: mol_type = other DNA
catttttgtgaaccacgagtgactgagg

SEQ ID NO: 3164 - DNA, 28 bp, synthetic construct
  source 1..28: mol_type = other DNA
ctcagtcactcgtggttcacaaaaatgg

SEQ ID NO: 3165 - DNA, 28 bp, synthetic construct
  source 1..28: mol_type = other DNA
gtggttcacaaaaatggcaaataatagg

SEQ ID NO: 3166 - DNA, 28 bp, synthetic construct
  source 1..28: mol_type = other DNA
tggcaaataataggagcactagaatagg

SEQ ID NO: 3167 - DNA, 28 bp, synthetic construct
  source 1..28: mol_type = other DNA
gcactagaataggagctctccatcctgg

SEQ ID NO: 3168 - DNA, 28 bp, synthetic construct
  source 1..28: mol_type = other DNA
ccatcctggttcgagtctttccagctgg

SEQ ID NO: 3169 - DNA, 28 bp, synthetic construct
  source 1..28: mol_type = other DNA
catcctggttcgagtctttccagctggg

SEQ ID NO: 3170 - DNA, 28 bp, synthetic construct
  source 1..28: mol_type = other DNA
atcctggttcgagtctttccagctgggg

SEQ ID NO: 3171 - DNA, 28 bp, synthetic construct
  source 1..28: mol_type = other DNA
tgccccagctggaaagactcgaaccagg

SEQ ID NO: 3172 - DNA, 28 bp, synthetic construct
  source 1..28: mol_type = other DNA
tctgcaaaggctaaactgccccagctgg

SEQ ID NO: 3173 - DNA, 28 bp, synthetic construct
  source 1..28: mol_type = other DNA
agtttagcctttgcagaatttctcaagg

SEQ ID NO: 3174 - DNA, 28 bp, synthetic construct
  source 1..28: mol_type = other DNA
gtttagcctttgcagaatttctcaaggg

SEQ ID NO: 3175 - DNA, 28 bp, synthetic construct
  source 1..28: mol_type = other DNA
atgttacccttgagaaattctgcaaagg

SEQ ID NO: 3176 - DNA, 28 bp, synthetic construct
  source 1..28: mol_type = other DNA
cttacactcacgggcttacagacagagg

SEQ ID NO: 3177 - DNA, 28 bp, synthetic construct
  source 1..28: mol_type = other DNA
cagcactttacaggcttacactcacggg

SEQ ID NO: 3178 - DNA, 28 bp, synthetic construct
  source 1..28: mol_type = other DNA
acagcactttacaggcttacactcacgg

SEQ ID NO: 3179 - DNA, 28 bp, synthetic construct
  source 1..28: mol_type = other DNA
gcctgtaaagtgctgtgctcatgcgagg

SEQ ID NO: 3180 - DNA, 28 bp, synthetic construct
  source 1..28: mol_type = other DNA
cctgtaaagtgctgtgctcatgcgaggg

SEQ ID NO: 3181 - DNA, 28 bp, synthetic construct
  source 1..28: mol_type = other DNA
aagtgctgtgctcatgcgagggatcagg

SEQ ID NO: 3182 - DNA, 28 bp, synthetic construct
  source 1..28: mol_type = other DNA
ctcatgcgagggatcaggtctgacctgg

SEQ ID NO: 3183 - DNA, 28 bp, synthetic construct
  source 1..28: mol_type = other DNA
tcatgcgagggatcaggtctgacctggg

SEQ ID NO: 3184 - DNA, 28 bp, synthetic construct
  source 1..28: mol_type = other DNA
acctgggaaactaaaagcatcttcatgg

SEQ ID NO: 3185 - DNA, 28 bp, synthetic construct
  source 1..28: mol_type = other DNA
tccatgaagatgcttttagtttcccagg

SEQ ID NO: 3186 - DNA, 28 bp, synthetic construct
  source 1..28: mol_type = other DNA
aaactaaaagcatcttcatggagcaagg

SEQ ID NO: 3187 - DNA, 28 bp, synthetic construct
  source 1..28: mol_type = other DNA
aactaaaagcatcttcatggagcaaggg

SEQ ID NO: 3188 - DNA, 28 bp, synthetic construct
  source 1..28: mol_type = other DNA
tcatggagcaagggtgctcctccagtgg

SEQ ID NO: 3189 - DNA, 28 bp, synthetic construct
  source 1..28: mol_type = other DNA
catggagcaagggtgctcctccagtggg

SEQ ID NO: 3190 - DNA, 28 bp, synthetic construct
  source 1..28: mol_type = other DNA
atggagcaagggtgctcctccagtgggg

SEQ ID NO: 3191 - DNA, 28 bp, synthetic construct
  source 1..28: mol_type = other DNA
tggagcaagggtgctcctccagtggggg

SEQ ID NO: 3192 - DNA, 28 bp, synthetic construct
  source 1..28: mol_type = other DNA
agaactcactgagcgcccccactggagg

SEQ ID NO: 3193 - DNA, 28 bp, synthetic construct
  source 1..28: mol_type = other DNA
cgcagaactcactgagcgcccccactgg

SEQ ID NO: 3194 - DNA, 28 bp, synthetic construct
  source 1..28: mol_type = other DNA
cagtgggggcgctcagtgagttctgcgg

SEQ ID NO: 3195 - DNA, 28 bp, synthetic construct
  source 1..28: mol_type = other DNA
ggggcgctcagtgagttctgcggtatgg

SEQ ID NO: 3196 - DNA, 28 bp, synthetic construct
  source 1..28: mol_type = other DNA
gggcgctcagtgagttctgcggtatggg

SEQ ID NO: 3197 - DNA, 28 bp, synthetic construct
  source 1..28: mol_type = other DNA
cggtatgggtgacagtattcttgtgtgg

SEQ ID NO: 3198 - DNA, 28 bp, synthetic construct
  source 1..28: mol_type = other DNA
tattcttgtgtggacagtattcatgtgg

SEQ ID NO: 3199 - DNA, 28 bp, synthetic construct
  source 1..28: mol_type = other DNA
gtgtggacagtattcatgtggtgattgg

SEQ ID NO: 3200 - DNA, 28 bp, synthetic construct
  source 1..28: mol_type = other DNA
tgtggacagtattcatgtggtgattggg

SEQ ID NO: 3201 - DNA, 28 bp, synthetic construct
  source 1..28: mol_type = other DNA
gtggacagtattcatgtggtgattgggg

SEQ ID NO: 3202 - DNA, 28 bp, synthetic construct
  source 1..28: mol_type = other DNA
gtattcatgtggtgattggggtaaatgg

SEQ ID NO: 3203 - DNA, 28 bp, synthetic construct
  source 1..28: mol_type = other DNA
ttggggtaaatggccctcttttgcctgg

SEQ ID NO: 3204 - DNA, 28 bp, synthetic construct
  source 1..28: mol_type = other DNA
ccctcttttgcctggttttctgcctcgg

SEQ ID NO: 3205 - DNA, 28 bp, synthetic construct
  source 1..28: mol_type = other DNA
accgaggcagaaaaccaggcaaaagagg

SEQ ID NO: 3206 - DNA, 28 bp, synthetic construct
  source 1..28: mol_type = other DNA
tgcacaatgaccgaggcagaaaaccagg

SEQ ID NO: 3207 - DNA, 28 bp, synthetic construct
  source 1..28: mol_type = other DNA
tcagtcagcagatgcacaatgaccgagg

SEQ ID NO: 3208 - DNA, 28 bp, synthetic construct
  source 1..28: mol_type = other DNA
gcatctgctgactgaacctgccttttgg

SEQ ID NO: 3209 - DNA, 28 bp, synthetic construct
  source 1..28: mol_type = other DNA
ctgtactttactaggaccaaaaggcagg

SEQ ID NO: 3210 - DNA, 28 bp, synthetic construct
  source 1..28: mol_type = other DNA
aaatctgtactttactaggaccaaaagg

SEQ ID NO: 3211 - DNA, 28 bp, synthetic construct
  source 1..28: mol_type = other DNA
ttggtcctagtaaagtacagatttcagg

SEQ ID NO: 3212 - DNA, 28 bp, synthetic construct
  source 1..28: mol_type = other DNA
cttttcctgaaatctgtactttactagg

SEQ ID NO: 3213 - DNA, 28 bp, synthetic construct
  source 1..28: mol_type = other DNA
gtacagatttcaggaaaagtgtacctgg

SEQ ID NO: 3214 - DNA, 28 bp, synthetic construct
  source 1..28: mol_type = other DNA
atttcaggaaaagtgtacctggccccgg

SEQ ID NO: 3215 - DNA, 28 bp, synthetic construct
  source 1..28: mol_type = other DNA
tttcaggaaaagtgtacctggccccggg

SEQ ID NO: 3216 - DNA, 28 bp, synthetic construct
  source 1..28: mol_type = other DNA
ttcaggaaaagtgtacctggccccgggg

SEQ ID NO: 3217 - DNA, 28 bp, synthetic construct
  source 1..28: mol_type = other DNA
tcaggaaaagtgtacctggccccggggg

SEQ ID NO: 3218 - DNA, 28 bp, synthetic construct
  source 1..28: mol_type = other DNA
ggaaaagtgtacctggccccgggggtgg

SEQ ID NO: 3219 - DNA, 28 bp, synthetic construct
  source 1..28: mol_type = other DNA
acagaggttggccacccccggggccagg

SEQ ID NO: 3220 - DNA, 28 bp, synthetic construct
  source 1..28: mol_type = other DNA
gtcacacagaggttggccacccccgggg

SEQ ID NO: 3221 - DNA, 28 bp, synthetic construct
  source 1..28: mol_type = other DNA
cgtcacacagaggttggccacccccggg

SEQ ID NO: 3222 - DNA, 28 bp, synthetic construct
  source 1..28: mol_type = other DNA
ccgggggtggccaacctctgtgtgacgg

SEQ ID NO: 3223 - DNA, 28 bp, synthetic construct
  source 1..28: mol_type = other DNA
gtgcttaaagccgtcacacagaggttgg

SEQ ID NO: 3224 - DNA, 28 bp, synthetic construct
  source 1..28: mol_type = other DNA
cactgtgcttaaagccgtcacacagagg

SEQ ID NO: 3225 - DNA, 28 bp, synthetic construct
  source 1..28: mol_type = other DNA
acggctttaagcacagtgtgtcttgagg

SEQ ID NO: 3226 - DNA, 28 bp, synthetic construct
  source 1..28: mol_type = other DNA
cggctttaagcacagtgtgtcttgaggg

SEQ ID NO: 3227 - DNA, 28 bp, synthetic construct
  source 1..28: mol_type = other DNA
ggctttaagcacagtgtgtcttgagggg

SEQ ID NO: 3228 - DNA, 28 bp, synthetic construct
  source 1..28: mol_type = other DNA
gctttaagcacagtgtgtcttgaggggg

SEQ ID NO: 3229 - DNA, 28 bp, synthetic construct
  source 1..28: mol_type = other DNA
agacaggcacttttcagatggagtcagg

SEQ ID NO: 3230 - DNA, 28 bp, synthetic construct
  source 1..28: mol_type = other DNA
tgactccatctgaaaagtgcctgtctgg

SEQ ID NO: 3231 - DNA, 28 bp, synthetic construct
  source 1..28: mol_type = other DNA
tacatccagacaggcacttttcagatgg

SEQ ID NO: 3232 - DNA, 28 bp, synthetic construct
  source 1..28: mol_type = other DNA
tggttatagacaggtacatccagacagg

SEQ ID NO: 3233 - DNA, 28 bp, synthetic construct
  source 1..28: mol_type = other DNA
gtctggatgtacctgtctataaccatgg

SEQ ID NO: 3234 - DNA, 28 bp, synthetic construct
  source 1..28: mol_type = other DNA
tggaggcaggtccatggttatagacagg

SEQ ID NO: 3235 - DNA, 28 bp, synthetic construct
  source 1..28: mol_type = other DNA
gtctataaccatggacctgcctccaagg

SEQ ID NO: 3236 - DNA, 28 bp, synthetic construct
  source 1..28: mol_type = other DNA
accatggacctgcctccaaggtgcgtgg

SEQ ID NO: 3237 - DNA, 28 bp, synthetic construct
  source 1..28: mol_type = other DNA
tccacgcaccttggaggcaggtccatgg

SEQ ID NO: 3238 - DNA, 28 bp, synthetic construct
  source 1..28: mol_type = other DNA
aggttggtccacgcaccttggaggcagg

SEQ ID NO: 3239 - DNA, 28 bp, synthetic construct
  source 1..28: mol_type = other DNA
gcggaggttggtccacgcaccttggagg

SEQ ID NO: 3240 - DNA, 28 bp, synthetic construct
  source 1..28: mol_type = other DNA
tacgcggaggttggtccacgcaccttgg

SEQ ID NO: 3241 - DNA, 28 bp, synthetic construct
  source 1..28: mol_type = other DNA
tcgagtgaatcaggtacgcggaggttgg

SEQ ID NO: 3242 - DNA, 28 bp, synthetic construct
  source 1..28: mol_type = other DNA
cgcatcgagtgaatcaggtacgcggagg

SEQ ID NO: 3243 - DNA, 28 bp, synthetic construct
  source 1..28: mol_type = other DNA
gtgcgcatcgagtgaatcaggtacgcgg

SEQ ID NO: 3244 - DNA, 28 bp, synthetic construct
  source 1..28: mol_type = other DNA
gtacctgattcactcgatgcgcacctgg

SEQ ID NO: 3245 - DNA, 28 bp, synthetic construct
  source 1..28: mol_type = other DNA
cggccaggtgcgcatcgagtgaatcagg

SEQ ID NO: 3246 - DNA, 28 bp, synthetic construct
  source 1..28: mol_type = other DNA
gcacctggccgtacgtagcttcatcagg

SEQ ID NO: 3247 - DNA, 28 bp, synthetic construct
  source 1..28: mol_type = other DNA
ctgcctgatgaagctacgtacggccagg

SEQ ID NO: 3248 - DNA, 28 bp, synthetic construct
  source 1..28: mol_type = other DNA
ctggccgtacgtagcttcatcaggcagg

SEQ ID NO: 3249 - DNA, 28 bp, synthetic construct
  source 1..28: mol_type = other DNA
tggccgtacgtagcttcatcaggcaggg

SEQ ID NO: 3250 - DNA, 28 bp, synthetic construct
  source 1..28: mol_type = other DNA
acaccctgcctgatgaagctacgtacgg

SEQ ID NO: 3251 - DNA, 28 bp, synthetic construct
  source 1..28: mol_type = other DNA
ggcagggtgtacctgtcaagttcttagg

SEQ ID NO: 3252 - DNA, 28 bp, synthetic construct
  source 1..28: mol_type = other DNA
gaacactcggacctaagaacttgacagg

SEQ ID NO: 3253 - DNA, 28 bp, synthetic construct
  source 1..28: mol_type = other DNA
tcaagttcttaggtccgagtgttcgcgg

SEQ ID NO: 3254 - DNA, 28 bp, synthetic construct
  source 1..28: mol_type = other DNA
caggacaggtaaagccgcgaacactcgg

SEQ ID NO: 3255 - DNA, 28 bp, synthetic construct
  source 1..28: mol_type = other DNA
cgagtgttcgcggctttacctgtcctgg

SEQ ID NO: 3256 - DNA, 28 bp, synthetic construct
  source 1..28: mol_type = other DNA
gaggtgcggacggcggtaccaggacagg

SEQ ID NO: 3257 - DNA, 28 bp, synthetic construct
  source 1..28: mol_type = other DNA
tgtcctggtaccgccgtccgcacctcgg

SEQ ID NO: 3258 - DNA, 28 bp, synthetic construct
  source 1..28: mol_type = other DNA
tgaccgaggtgcggacggcggtaccagg

SEQ ID NO: 3259 - DNA, 28 bp, synthetic construct
  source 1..28: mol_type = other DNA
gacgcactgaccgaggtgcggacggcgg

SEQ ID NO: 3260 - DNA, 28 bp, synthetic construct
  source 1..28: mol_type = other DNA
ggggacgcactgaccgaggtgcggacgg

SEQ ID NO: 3261 - DNA, 28 bp, synthetic construct
  source 1..28: mol_type = other DNA
gtccgcacctcggtcagtgcgtccccgg

SEQ ID NO: 3262 - DNA, 28 bp, synthetic construct
  source 1..28: mol_type = other DNA
tgccggggacgcactgaccgaggtgcgg

SEQ ID NO: 3263 - DNA, 28 bp, synthetic construct
  source 1..28: mol_type = other DNA
gcacctcggtcagtgcgtccccggcagg

SEQ ID NO: 3264 - DNA, 28 bp, synthetic construct
  source 1..28: mol_type = other DNA
gcacctgccggggacgcactgaccgagg

SEQ ID NO: 3265 - DNA, 28 bp, synthetic construct
  source 1..28: mol_type = other DNA
ctgaatcaggtacacgcacctgccgggg

SEQ ID NO: 3266 - DNA, 28 bp, synthetic construct
  source 1..28: mol_type = other DNA
actgaatcaggtacacgcacctgccggg

SEQ ID NO: 3267 - DNA, 28 bp, synthetic construct
  source 1..28: mol_type = other DNA
gactgaatcaggtacacgcacctgccgg

SEQ ID NO: 3268 - DNA, 28 bp, synthetic construct
  source 1..28: mol_type = other DNA
gcgcaagataagcacggactgaatcagg

SEQ ID NO: 3269 - DNA, 28 bp, synthetic construct
  source 1..28: mol_type = other DNA
tcagtccgtgcttatcttgcgcatacgg

SEQ ID NO: 3270 - DNA, 28 bp, synthetic construct
  source 1..28: mol_type = other DNA
cagtccgtgcttatcttgcgcatacggg

SEQ ID NO: 3271 - DNA, 28 bp, synthetic construct
  source 1..28: mol_type = other DNA
acggcccgtatgcgcaagataagcacgg

SEQ ID NO: 3272 - DNA, 28 bp, synthetic construct
  source 1..28: mol_type = other DNA
catacgggccgttcagtgtcccgctcgg

SEQ ID NO: 3273 - DNA, 28 bp, synthetic construct
  source 1..28: mol_type = other DNA
gacgagctccgagcgggacactgaacgg

SEQ ID NO: 3274 - DNA, 28 bp, synthetic construct
  source 1..28: mol_type = other DNA
gctgcggcggcgacgagctccgagcggg

SEQ ID NO: 3275 - DNA, 28 bp, synthetic construct
  source 1..28: mol_type = other DNA
ggctgcggcggcgacgagctccgagcgg

SEQ ID NO: 3276 - DNA, 28 bp, synthetic construct
  source 1..28: mol_type = other DNA
ggagctcgtcgccgccgcagccttgagg

SEQ ID NO: 3277 - DNA, 28 bp, synthetic construct
  source 1..28: mol_type = other DNA
gggggtcggagcctcaaggctgcggcgg

SEQ ID NO: 3278 - DNA, 28 bp, synthetic construct
  source 1..28: mol_type = other DNA
agcgggggtcggagcctcaaggctgcgg

SEQ ID NO: 3279 - DNA, 28 bp, synthetic construct
  source 1..28: mol_type = other DNA
cagccttgaggctccgacccccgcttgg

SEQ ID NO: 3280 - DNA, 28 bp, synthetic construct
  source 1..28: mol_type = other DNA
agccttgaggctccgacccccgcttggg

SEQ ID NO: 3281 - DNA, 28 bp, synthetic construct
  source 1..28: mol_type = other DNA
ggcccaagcgggggtcggagcctcaagg

SEQ ID NO: 3282 - DNA, 28 bp, synthetic construct
  source 1..28: mol_type = other DNA
ctccgacccccgcttgggccccgtccgg

SEQ ID NO: 3283 - DNA, 28 bp, synthetic construct
  source 1..28: mol_type = other DNA
cgccggacggggcccaagcgggggtcgg

SEQ ID NO: 3284 - DNA, 28 bp, synthetic construct
  source 1..28: mol_type = other DNA
tgcgcgccggacggggcccaagcggggg

SEQ ID NO: 3285 - DNA, 28 bp, synthetic construct
  source 1..28: mol_type = other DNA
ctgcgcgccggacggggcccaagcgggg

SEQ ID NO: 3286 - DNA, 28 bp, synthetic construct
  source 1..28: mol_type = other DNA
gctgcgcgccggacggggcccaagcggg

SEQ ID NO: 3287 - DNA, 28 bp, synthetic construct
  source 1..28: mol_type = other DNA
cgctgcgcgccggacggggcccaagcgg

SEQ ID NO: 3288 - DNA, 28 bp, synthetic construct
  source 1..28: mol_type = other DNA
cgcttgggccccgtccggcgcgcagcgg

SEQ ID NO: 3289 - DNA, 28 bp, synthetic construct
  source 1..28: mol_type = other DNA
ggccccgtccggcgcgcagcggccgcgg

SEQ ID NO: 3290 - DNA, 28 bp, synthetic construct
  source 1..28: mol_type = other DNA
gccccgtccggcgcgcagcggccgcggg

SEQ ID NO: 3291 - DNA, 28 bp, synthetic construct
  source 1..28: mol_type = other DNA
ccccgtccggcgcgcagcggccgcgggg

SEQ ID NO: 3292 - DNA, 28 bp, synthetic construct
  source 1..28: mol_type = other DNA
cccgtccggcgcgcagcggccgcggggg

SEQ ID NO: 3293 - DNA, 28 bp, synthetic construct
  source 1..28: mol_type = other DNA
gcccccgcggccgctgcgcgccggacgg

SEQ ID NO: 3294 - DNA, 28 bp, synthetic construct
  source 1..28: mol_type = other DNA
gtccggcgcgcagcggccgcgggggcgg

SEQ ID NO: 3295 - DNA, 28 bp, synthetic construct
  source 1..28: mol_type = other DNA
tccggcgcgcagcggccgcgggggcggg

SEQ ID NO: 3296 - DNA, 28 bp, synthetic construct
  source 1..28: mol_type = other DNA
ccggcgcgcagcggccgcgggggcgggg

SEQ ID NO: 3297 - DNA, 28 bp, synthetic construct
  source 1..28: mol_type = other DNA
gccgcgggggcggggccgcgacgcgagg

SEQ ID NO: 3298 - DNA, 28 bp, synthetic construct
  source 1..28: mol_type = other DNA
tcctcgcgtcgcggccccgcccccgcgg

SEQ ID NO: 3299 - DNA, 28 bp, synthetic construct
  source 1..28: mol_type = other DNA
gggggcggggccgcgacgcgaggagcgg

SEQ ID NO: 3300 - DNA, 28 bp, synthetic construct
  source 1..28: mol_type = other DNA
ggggccgcgacgcgaggagcggagcagg

SEQ ID NO: 3301 - DNA, 28 bp, synthetic construct
  source 1..28: mol_type = other DNA
ccgcgacgcgaggagcggagcaggaagg

SEQ ID NO: 3302 - DNA, 28 bp, synthetic construct
  source 1..28: mol_type = other DNA
cgcgacgcgaggagcggagcaggaaggg

SEQ ID NO: 3303 - DNA, 28 bp, synthetic construct
  source 1..28: mol_type = other DNA
gcgacgcgaggagcggagcaggaagggg

SEQ ID NO: 3304 - DNA, 28 bp, synthetic construct
  source 1..28: mol_type = other DNA
gcgaggagcggagcaggaaggggcgagg

SEQ ID NO: 3305 - DNA, 28 bp, synthetic construct
  source 1..28: mol_type = other DNA
ggaaggggcgaggcagccccgcccccgg

SEQ ID NO: 3306 - DNA, 28 bp, synthetic construct
  source 1..28: mol_type = other DNA
gaaggggcgaggcagccccgcccccggg

SEQ ID NO: 3307 - DNA, 28 bp, synthetic construct
  source 1..28: mol_type = other DNA
aaggggcgaggcagccccgcccccgggg

SEQ ID NO: 3308 - DNA, 28 bp, synthetic construct
  source 1..28: mol_type = other DNA
gggcgaggcagccccgcccccggggcgg

SEQ ID NO: 3309 - DNA, 28 bp, synthetic construct
  source 1..28: mol_type = other DNA
cagccccgcccccggggcggtctcccgg

SEQ ID NO: 3310 - DNA, 28 bp, synthetic construct
  source 1..28: mol_type = other DNA
agccccgcccccggggcggtctcccggg

SEQ ID NO: 3311 - DNA, 28 bp, synthetic construct
  source 1..28: mol_type = other DNA
gtcccgggagaccgccccgggggcgggg

SEQ ID NO: 3312 - DNA, 28 bp, synthetic construct
  source 1..28: mol_type = other DNA
cgtcccgggagaccgccccgggggcggg

SEQ ID NO: 3313 - DNA, 28 bp, synthetic construct
  source 1..28: mol_type = other DNA
ccgcccccggggcggtctcccgggacgg

SEQ ID NO: 3314 - DNA, 28 bp, synthetic construct
  source 1..28: mol_type = other DNA
gggccgtcccgggagaccgccccggggg

SEQ ID NO: 3315 - DNA, 28 bp, synthetic construct
  source 1..28: mol_type = other DNA
ggggccgtcccgggagaccgccccgggg

SEQ ID NO: 3316 - DNA, 28 bp, synthetic construct
  source 1..28: mol_type = other DNA
cggggccgtcccgggagaccgccccggg

SEQ ID NO: 3317 - DNA, 28 bp, synthetic construct
  source 1..28: mol_type = other DNA
gcggggccgtcccgggagaccgccccgg

SEQ ID NO: 3318 - DNA, 28 bp, synthetic construct
  source 1..28: mol_type = other DNA
agcgggcaaggggcggggccgtcccggg

SEQ ID NO: 3319 - DNA, 28 bp, synthetic construct
  source 1..28: mol_type = other DNA
aagcgggcaaggggcggggccgtcccgg

SEQ ID NO: 3320 - DNA, 28 bp, synthetic construct
  source 1..28: mol_type = other DNA
ctgacgcggaagcgggcaaggggcgggg

SEQ ID NO: 3321 - DNA, 28 bp, synthetic construct
  source 1..28: mol_type = other DNA
actgacgcggaagcgggcaaggggcggg

SEQ ID NO: 3322 - DNA, 28 bp, synthetic construct
  source 1..28: mol_type = other DNA
cactgacgcggaagcgggcaaggggcgg

SEQ ID NO: 3323 - DNA, 28 bp, synthetic construct
  source 1..28: mol_type = other DNA
aggcactgacgcggaagcgggcaagggg

SEQ ID NO: 3324 - DNA, 28 bp, synthetic construct
  source 1..28: mol_type = other DNA
gaggcactgacgcggaagcgggcaaggg

SEQ ID NO: 3325 - DNA, 28 bp, synthetic construct
  source 1..28: mol_type = other DNA
tgaggcactgacgcggaagcgggcaagg

SEQ ID NO: 3326 - DNA, 28 bp, synthetic construct
  source 1..28: mol_type = other DNA
ggtggtgaggcactgacgcggaagcggg

SEQ ID NO: 3327 - DNA, 28 bp, synthetic construct
  source 1..28: mol_type = other DNA
tggtggtgaggcactgacgcggaagcgg

SEQ ID NO: 3328 - DNA, 28 bp, synthetic construct
  source 1..28: mol_type = other DNA
ggcaggtggtggtgaggcactgacgcgg

SEQ ID NO: 3329 - DNA, 28 bp, synthetic construct
  source 1..28: mol_type = other DNA
ggcggcgcgcgggcaggtggtggtgagg

SEQ ID NO: 3330 - DNA, 28 bp, synthetic construct
  source 1..28: mol_type = other DNA
tatggggcggcgcgcgggcaggtggtgg

SEQ ID NO: 3331 - DNA, 28 bp, synthetic construct
  source 1..28: mol_type = other DNA
ttatatggggcggcgcgcgggcaggtgg

SEQ ID NO: 3332 - DNA, 28 bp, synthetic construct
  source 1..28: mol_type = other DNA
cctgcccgcgcgccgccccatataaagg

SEQ ID NO: 3333 - DNA, 28 bp, synthetic construct
  source 1..28: mol_type = other DNA
ggcgcctttatatggggcggcgcgcggg

SEQ ID NO: 3334 - DNA, 28 bp, synthetic construct
  source 1..28: mol_type = other DNA
cggcgcctttatatggggcggcgcgcgg

SEQ ID NO: 3335 - DNA, 28 bp, synthetic construct
  source 1..28: mol_type = other DNA
aggacggcggcgcctttatatggggcgg

SEQ ID NO: 3336 - DNA, 28 bp, synthetic construct
  source 1..28: mol_type = other DNA
gtaaggacggcggcgcctttatatgggg

SEQ ID NO: 3337 - DNA, 28 bp, synthetic construct
  source 1..28: mol_type = other DNA
ggtaaggacggcggcgcctttatatggg

SEQ ID NO: 3338 - DNA, 28 bp, synthetic construct
  source 1..28: mol_type = other DNA
gggtaaggacggcggcgcctttatatgg

SEQ ID NO: 3339 - DNA, 28 bp, synthetic construct
  source 1..28: mol_type = other DNA
taaaggcgccgccgtccttacccccagg

SEQ ID NO: 3340 - DNA, 28 bp, synthetic construct
  source 1..28: mol_type = other DNA
cgccgccgtccttacccccaggactcgg

SEQ ID NO: 3341 - DNA, 28 bp, synthetic construct
  source 1..28: mol_type = other DNA
ggccgagtcctgggggtaaggacggcgg

SEQ ID NO: 3342 - DNA, 28 bp, synthetic construct
  source 1..28: mol_type = other DNA
tggggccgagtcctgggggtaaggacgg

SEQ ID NO: 3343 - DNA, 28 bp, synthetic construct
  source 1..28: mol_type = other DNA
tccttacccccaggactcggccccatgg

SEQ ID NO: 3344 - DNA, 28 bp, synthetic construct
  source 1..28: mol_type = other DNA
tccatggggccgagtcctgggggtaagg

SEQ ID NO: 3345 - DNA, 28 bp, synthetic construct
  source 1..28: mol_type = other DNA
gcgtctccatggggccgagtcctggggg

SEQ ID NO: 3346 - DNA, 28 bp, synthetic construct
  source 1..28: mol_type = other DNA
ggcgtctccatggggccgagtcctgggg

SEQ ID NO: 3347 - DNA, 28 bp, synthetic construct
  source 1..28: mol_type = other DNA
cggcgtctccatggggccgagtcctggg

SEQ ID NO: 3348 - DNA, 28 bp, synthetic construct
  source 1..28: mol_type = other DNA
gcggcgtctccatggggccgagtcctgg

SEQ ID NO: 3349 - DNA, 28 bp, synthetic construct
  source 1..28: mol_type = other DNA
ggactcggccccatggagacgccgccgg

SEQ ID NO: 3350 - DNA, 28 bp, synthetic construct
  source 1..28: mol_type = other DNA
agcggcggccggcggcgtctccatgggg

SEQ ID NO: 3351 - DNA, 28 bp, synthetic construct
  source 1..28: mol_type = other DNA
cagcggcggccggcggcgtctccatggg

SEQ ID NO: 3352 - DNA, 28 bp, synthetic construct
  source 1..28: mol_type = other DNA
ccatggagacgccgccggccgccgctgg

SEQ ID NO: 3353 - DNA, 28 bp, synthetic construct
  source 1..28: mol_type = other DNA
gacgccgccggccgccgctggcgcatgg

SEQ ID NO: 3354 - DNA, 28 bp, synthetic construct
  source 1..28: mol_type = other DNA
gccgccggccgccgctggcgcatggcgg

SEQ ID NO: 3355 - DNA, 28 bp, synthetic construct
  source 1..28: mol_type = other DNA
ccgccggccgccgctggcgcatggcggg

SEQ ID NO: 3356 - DNA, 28 bp, synthetic construct
  source 1..28: mol_type = other DNA
cgccggccgccgctggcgcatggcgggg

SEQ ID NO: 3357 - DNA, 28 bp, synthetic construct
  source 1..28: mol_type = other DNA
caccccgccatgcgccagcggcggccgg

SEQ ID NO: 3358 - DNA, 28 bp, synthetic construct
  source 1..28: mol_type = other DNA
gccgccgctggcgcatggcggggtgagg

SEQ ID NO: 3359 - DNA, 28 bp, synthetic construct
  source 1..28: mol_type = other DNA
gcctcaccccgccatgcgccagcggcgg

SEQ ID NO: 3360 - DNA, 28 bp, synthetic construct
  source 1..28: mol_type = other DNA
cgcgcctcaccccgccatgcgccagcgg

SEQ ID NO: 3361 - DNA, 28 bp, synthetic construct
  source 1..28: mol_type = other DNA
cgctggcgcatggcggggtgaggcgcgg

SEQ ID NO: 3362 - DNA, 28 bp, synthetic construct
  source 1..28: mol_type = other DNA
tggcgcatggcggggtgaggcgcggcgg

SEQ ID NO: 3363 - DNA, 28 bp, synthetic construct
  source 1..28: mol_type = other DNA
ggcgcatggcggggtgaggcgcggcggg

SEQ ID NO: 3364 - DNA, 28 bp, synthetic construct
  source 1..28: mol_type = other DNA
gcgcatggcggggtgaggcgcggcgggg

SEQ ID NO: 3365 - DNA, 28 bp, synthetic construct
  source 1..28: mol_type = other DNA
catggcggggtgaggcgcggcggggagg

SEQ ID NO: 3366 - DNA, 28 bp, synthetic construct
  source 1..28: mol_type = other DNA
atggcggggtgaggcgcggcggggaggg

SEQ ID NO: 3367 - DNA, 28 bp, synthetic construct
  source 1..28: mol_type = other DNA
ggggtgaggcgcggcggggagggtgcgg

SEQ ID NO: 3368 - DNA, 28 bp, synthetic construct
  source 1..28: mol_type = other DNA
gggtgaggcgcggcggggagggtgcggg

SEQ ID NO: 3369 - DNA, 28 bp, synthetic construct
  source 1..28: mol_type = other DNA
actgaacaaccaacagggttagggacgg

SEQ ID NO: 3370 - DNA, 28 bp, synthetic construct
  source 1..28: mol_type = other DNA
tccctaaccctgttggttgttcagtagg

SEQ ID NO: 3371 - DNA, 28 bp, synthetic construct
  source 1..28: mol_type = other DNA
tcctactgaacaaccaacagggttaggg

SEQ ID NO: 3372 - DNA, 28 bp, synthetic construct
  source 1..28: mol_type = other DNA
ctcctactgaacaaccaacagggttagg

SEQ ID NO: 3373 - DNA, 28 bp, synthetic construct
  source 1..28: mol_type = other DNA
cacagctcctactgaacaaccaacaggg

SEQ ID NO: 3374 - DNA, 28 bp, synthetic construct
  source 1..28: mol_type = other DNA
cctgttggttgttcagtaggagctgtgg

SEQ ID NO: 3375 - DNA, 28 bp, synthetic construct
  source 1..28: mol_type = other DNA
tggttgttcagtaggagctgtggcgcgg

SEQ ID NO: 3376 - DNA, 28 bp, synthetic construct
  source 1..28: mol_type = other DNA
ggttgttcagtaggagctgtggcgcggg

SEQ ID NO: 3377 - DNA, 28 bp, synthetic construct
  source 1..28: mol_type = other DNA
gttgttcagtaggagctgtggcgcgggg

SEQ ID NO: 3378 - DNA, 28 bp, synthetic construct
  source 1..28: mol_type = other DNA
agtgaacagcttagactctcgtatttgg

SEQ ID NO: 3379 - DNA, 28 bp, synthetic construct
  source 1..28: mol_type = other DNA
atacgagagtctaagctgttcactgagg

SEQ ID NO: 3380 - DNA, 28 bp, synthetic construct
  source 1..28: mol_type = other DNA
tacgagagtctaagctgttcactgaggg

SEQ ID NO: 3381 - DNA, 28 bp, synthetic construct
  source 1..28: mol_type = other DNA
acgagagtctaagctgttcactgagggg

SEQ ID NO: 3382 - DNA, 28 bp, synthetic construct
  source 1..28: mol_type = other DNA
cgagagtctaagctgttcactgaggggg

SEQ ID NO: 3383 - DNA, 28 bp, synthetic construct
  source 1..28: mol_type = other DNA
tgttcactgagggggcagtgagacgtgg

SEQ ID NO: 3384 - DNA, 28 bp, synthetic construct
  source 1..28: mol_type = other DNA
gttcactgagggggcagtgagacgtggg

SEQ ID NO: 3385 - DNA, 28 bp, synthetic construct
  source 1..28: mol_type = other DNA
ttcactgagggggcagtgagacgtgggg

SEQ ID NO: 3386 - DNA, 28 bp, synthetic construct
  source 1..28: mol_type = other DNA
agggggcagtgagacgtggggctgctgg

SEQ ID NO: 3387 - DNA, 28 bp, synthetic construct
  source 1..28: mol_type = other DNA
agtgagacgtggggctgctggtcctagg

SEQ ID NO: 3388 - DNA, 28 bp, synthetic construct
  source 1..28: mol_type = other DNA
cactaggtgtcatggaagagctcctagg

SEQ ID NO: 3389 - DNA, 28 bp, synthetic construct
  source 1..28: mol_type = other DNA
ctcttccatgacacctagtgttacctgg

SEQ ID NO: 3390 - DNA, 28 bp, synthetic construct
  source 1..28: mol_type = other DNA
tcttccatgacacctagtgttacctggg

SEQ ID NO: 3391 - DNA, 28 bp, synthetic construct
  source 1..28: mol_type = other DNA
ggctcccaggtaacactaggtgtcatgg

SEQ ID NO: 3392 - DNA, 28 bp, synthetic construct
  source 1..28: mol_type = other DNA
gggcttggggctcccaggtaacactagg

SEQ ID NO: 3393 - DNA, 28 bp, synthetic construct
  source 1..28: mol_type = other DNA
tgggggactggggcttggggctcccagg

SEQ ID NO: 3394 - DNA, 28 bp, synthetic construct
  source 1..28: mol_type = other DNA
ctgagggatgggggactggggcttgggg

SEQ ID NO: 3395 - DNA, 28 bp, synthetic construct
  source 1..28: mol_type = other DNA
cccaagccccagtcccccatccctcagg

SEQ ID NO: 3396 - DNA, 28 bp, synthetic construct
  source 1..28: mol_type = other DNA
tcctgagggatgggggactggggcttgg

SEQ ID NO: 3397 - DNA, 28 bp, synthetic construct
  source 1..28: mol_type = other DNA
ggatttcctgagggatgggggactgggg

SEQ ID NO: 3398 - DNA, 28 bp, synthetic construct
  source 1..28: mol_type = other DNA
tggatttcctgagggatgggggactggg

SEQ ID NO: 3399 - DNA, 28 bp, synthetic construct
  source 1..28: mol_type = other DNA
ctggatttcctgagggatgggggactgg

SEQ ID NO: 3400 - DNA, 28 bp, synthetic construct
  source 1..28: mol_type = other DNA
tcccccatccctcaggaaatccagttgg

SEQ ID NO: 3401 - DNA, 28 bp, synthetic construct
  source 1..28: mol_type = other DNA
tccaactggatttcctgagggatggggg

SEQ ID NO: 3402 - DNA, 28 bp, synthetic construct
  source 1..28: mol_type = other DNA
ttccaactggatttcctgagggatgggg

SEQ ID NO: 3403 - DNA, 28 bp, synthetic construct
  source 1..28: mol_type = other DNA
gttccaactggatttcctgagggatggg

SEQ ID NO: 3404 - DNA, 28 bp, synthetic construct
  source 1..28: mol_type = other DNA
ggttccaactggatttcctgagggatgg

SEQ ID NO: 3405 - DNA, 28 bp, synthetic construct
  source 1..28: mol_type = other DNA
taggggttccaactggatttcctgaggg

SEQ ID NO: 3406 - DNA, 28 bp, synthetic construct
  source 1..28: mol_type = other DNA
gtaggggttccaactggatttcctgagg

SEQ ID NO: 3407 - DNA, 28 bp, synthetic construct
  source 1..28: mol_type = other DNA
aatccagttggaacccctactttgcagg

SEQ ID NO: 3408 - DNA, 28 bp, synthetic construct
  source 1..28: mol_type = other DNA
atccagttggaacccctactttgcaggg

SEQ ID NO: 3409 - DNA, 28 bp, synthetic construct
  source 1..28: mol_type = other DNA
ggccctgcaaagtaggggttccaactgg

SEQ ID NO: 3410 - DNA, 28 bp, synthetic construct
  source 1..28: mol_type = other DNA
aacccctactttgcagggccatctttgg

SEQ ID NO: 3411 - DNA, 28 bp, synthetic construct
  source 1..28: mol_type = other DNA
ggccaaagatggccctgcaaagtagggg

SEQ ID NO: 3412 - DNA, 28 bp, synthetic construct
  source 1..28: mol_type = other DNA
aggccaaagatggccctgcaaagtaggg

SEQ ID NO: 3413 - DNA, 28 bp, synthetic construct
  source 1..28: mol_type = other DNA
caggccaaagatggccctgcaaagtagg

SEQ ID NO: 3414 - DNA, 28 bp, synthetic construct
  source 1..28: mol_type = other DNA
gggccatctttggcctgaagccaccagg

SEQ ID NO: 3415 - DNA, 28 bp, synthetic construct
  source 1..28: mol_type = other DNA
tttcctggtggcttcaggccaaagatgg

SEQ ID NO: 3416 - DNA, 28 bp, synthetic construct
  source 1..28: mol_type = other DNA
gtgggacagctttcctggtggcttcagg

SEQ ID NO: 3417 - DNA, 28 bp, synthetic construct
  source 1..28: mol_type = other DNA
tcagtcagtgggacagctttcctggtgg

SEQ ID NO: 3418 - DNA, 28 bp, synthetic construct
  source 1..28: mol_type = other DNA
gggtcagtcagtgggacagctttcctgg

SEQ ID NO: 3419 - DNA, 28 bp, synthetic construct
  source 1..28: mol_type = other DNA
ctgtcccactgactgacccctcttaagg

SEQ ID NO: 3420 - DNA, 28 bp, synthetic construct
  source 1..28: mol_type = other DNA
gcttccttaagaggggtcagtcagtggg

SEQ ID NO: 3421 - DNA, 28 bp, synthetic construct
  source 1..28: mol_type = other DNA
agcttccttaagaggggtcagtcagtgg

SEQ ID NO: 3422 - DNA, 28 bp, synthetic construct
  source 1..28: mol_type = other DNA
cagcagtctgcagcttccttaagagggg

SEQ ID NO: 3423 - DNA, 28 bp, synthetic construct
  source 1..28: mol_type = other DNA
ccctcttaaggaagctgcagactgctgg

SEQ ID NO: 3424 - DNA, 28 bp, synthetic construct
  source 1..28: mol_type = other DNA
cctcttaaggaagctgcagactgctggg

SEQ ID NO: 3425 - DNA, 28 bp, synthetic construct
  source 1..28: mol_type = other DNA
gactgctgggcccattttcagatagagg

SEQ ID NO: 3426 - DNA, 28 bp, synthetic construct
  source 1..28: mol_type = other DNA
ctgggcccattttcagatagaggaacgg

SEQ ID NO: 3427 - DNA, 28 bp, synthetic construct
  source 1..28: mol_type = other DNA
gctctccgttcctctatctgaaaatggg

SEQ ID NO: 3428 - DNA, 28 bp, synthetic construct
  source 1..28: mol_type = other DNA
agctctccgttcctctatctgaaaatgg

SEQ ID NO: 3429 - DNA, 28 bp, synthetic construct
  source 1..28: mol_type = other DNA
tttcagatagaggaacggagagctgcgg

SEQ ID NO: 3430 - DNA, 28 bp, synthetic construct
  source 1..28: mol_type = other DNA
gaggaacggagagctgcggcagcccagg

SEQ ID NO: 3431 - DNA, 28 bp, synthetic construct
  source 1..28: mol_type = other DNA
gctgcggcagcccaggagccctgccagg

SEQ ID NO: 3432 - DNA, 28 bp, synthetic construct
  source 1..28: mol_type = other DNA
cagaaggaagcctggcagggctcctggg

SEQ ID NO: 3433 - DNA, 28 bp, synthetic construct
  source 1..28: mol_type = other DNA
ccaggagccctgccaggcttccttctgg

SEQ ID NO: 3434 - DNA, 28 bp, synthetic construct
  source 1..28: mol_type = other DNA
caggagccctgccaggcttccttctggg

SEQ ID NO: 3435 - DNA, 28 bp, synthetic construct
  source 1..28: mol_type = other DNA
gctgcacccagaaggaagcctggcaggg

SEQ ID NO: 3436 - DNA, 28 bp, synthetic construct
  source 1..28: mol_type = other DNA
ggctgcacccagaaggaagcctggcagg

SEQ ID NO: 3437 - DNA, 28 bp, synthetic construct
  source 1..28: mol_type = other DNA
aggtggctgcacccagaaggaagcctgg

SEQ ID NO: 3438 - DNA, 28 bp, synthetic construct
  source 1..28: mol_type = other DNA
gcttccttctgggtgcagccacctgtgg

SEQ ID NO: 3439 - DNA, 28 bp, synthetic construct
  source 1..28: mol_type = other DNA
cttccttctgggtgcagccacctgtggg

SEQ ID NO: 3440 - DNA, 28 bp, synthetic construct
  source 1..28: mol_type = other DNA
ccttctgggtgcagccacctgtgggtgg

SEQ ID NO: 3441 - DNA, 28 bp, synthetic construct
  source 1..28: mol_type = other DNA
cttctgggtgcagccacctgtgggtggg

SEQ ID NO: 3442 - DNA, 28 bp, synthetic construct
  source 1..28: mol_type = other DNA
ttctgggtgcagccacctgtgggtgggg

SEQ ID NO: 3443 - DNA, 28 bp, synthetic construct
  source 1..28: mol_type = other DNA
ggtgcagccacctgtgggtggggcgcgg

SEQ ID NO: 3444 - DNA, 28 bp, synthetic construct
  source 1..28: mol_type = other DNA
gacgaggccgcgccccacccacaggtgg

SEQ ID NO: 3445 - DNA, 28 bp, synthetic construct
  source 1..28: mol_type = other DNA
tcagacgaggccgcgccccacccacagg

SEQ ID NO: 3446 - DNA, 28 bp, synthetic construct
  source 1..28: mol_type = other DNA
tggggcgcggcctcgtctgagaccaagg

SEQ ID NO: 3447 - DNA, 28 bp, synthetic construct
  source 1..28: mol_type = other DNA
gcgcggcctcgtctgagaccaaggcagg

SEQ ID NO: 3448 - DNA, 28 bp, synthetic construct
  source 1..28: mol_type = other DNA
cgcggcctcgtctgagaccaaggcaggg

SEQ ID NO: 3449 - DNA, 28 bp, synthetic construct
  source 1..28: mol_type = other DNA
atgggccctgccttggtctcagacgagg

SEQ ID NO: 3450 - DNA, 28 bp, synthetic construct
  source 1..28: mol_type = other DNA
gctgagtaaggcatgggccctgccttgg

SEQ ID NO: 3451 - DNA, 28 bp, synthetic construct
  source 1..28: mol_type = other DNA
tagcaaggacagctgagtaaggcatggg

SEQ ID NO: 3452 - DNA, 28 bp, synthetic construct
  source 1..28: mol_type = other DNA
ttagcaaggacagctgagtaaggcatgg

SEQ ID NO: 3453 - DNA, 28 bp, synthetic construct
  source 1..28: mol_type = other DNA
gactcttagcaaggacagctgagtaagg

SEQ ID NO: 3454 - DNA, 28 bp, synthetic construct
  source 1..28: mol_type = other DNA
ggaagatgctaggggactcttagcaagg

SEQ ID NO: 3455 - DNA, 28 bp, synthetic construct
  source 1..28: mol_type = other DNA
taagagtcccctagcatcttcctgatgg

SEQ ID NO: 3456 - DNA, 28 bp, synthetic construct
  source 1..28: mol_type = other DNA
agaaagaccatcaggaagatgctagggg

SEQ ID NO: 3457 - DNA, 28 bp, synthetic construct
  source 1..28: mol_type = other DNA
cagaaagaccatcaggaagatgctaggg

SEQ ID NO: 3458 - DNA, 28 bp, synthetic construct
  source 1..28: mol_type = other DNA
gcagaaagaccatcaggaagatgctagg

SEQ ID NO: 3459 - DNA, 28 bp, synthetic construct
  source 1..28: mol_type = other DNA
catcttcctgatggtctttctgccttgg

SEQ ID NO: 3460 - DNA, 28 bp, synthetic construct
  source 1..28: mol_type = other DNA
atcttcctgatggtctttctgccttggg

SEQ ID NO: 3461 - DNA, 28 bp, synthetic construct
  source 1..28: mol_type = other DNA
tcttcctgatggtctttctgccttgggg

SEQ ID NO: 3462 - DNA, 28 bp, synthetic construct
  source 1..28: mol_type = other DNA
ttcaccccaaggcagaaagaccatcagg

SEQ ID NO: 3463 - DNA, 28 bp, synthetic construct
  source 1..28: mol_type = other DNA
atggtctttctgccttggggtgaagagg

SEQ ID NO: 3464 - DNA, 28 bp, synthetic construct
  source 1..28: mol_type = other DNA
ttctgccttggggtgaagaggcatttgg

SEQ ID NO: 3465 - DNA, 28 bp, synthetic construct
  source 1..28: mol_type = other DNA
tctgccttggggtgaagaggcatttggg

SEQ ID NO: 3466 - DNA, 28 bp, synthetic construct
  source 1..28: mol_type = other DNA
ctgccttggggtgaagaggcatttgggg

SEQ ID NO: 3467 - DNA, 28 bp, synthetic construct
  source 1..28: mol_type = other DNA
tgccttggggtgaagaggcatttggggg

SEQ ID NO: 3468 - DNA, 28 bp, synthetic construct
  source 1..28: mol_type = other DNA
ttcccccaaatgcctcttcaccccaagg

SEQ ID NO: 3469 - DNA, 28 bp, synthetic construct
  source 1..28: mol_type = other DNA
gaggcatttgggggaattgccatcttgg

SEQ ID NO: 3470 - DNA, 28 bp, synthetic construct
  source 1..28: mol_type = other DNA
aggcatttgggggaattgccatcttggg

SEQ ID NO: 3471 - DNA, 28 bp, synthetic construct
  source 1..28: mol_type = other DNA
catttgggggaattgccatcttgggagg

SEQ ID NO: 3472 - DNA, 28 bp, synthetic construct
  source 1..28: mol_type = other DNA
aaggatactgcttttcctcccaagatgg

SEQ ID NO: 3473 - DNA, 28 bp, synthetic construct
  source 1..28: mol_type = other DNA
agtatcctttcactttcagactgaaagg

SEQ ID NO: 3474 - DNA, 28 bp, synthetic construct
  source 1..28: mol_type = other DNA
aggagcctttcagtctgaaagtgaaagg

SEQ ID NO: 3475 - DNA, 28 bp, synthetic construct
  source 1..28: mol_type = other DNA
tttcactttcagactgaaaggctcctgg

SEQ ID NO: 3476 - DNA, 28 bp, synthetic construct
  source 1..28: mol_type = other DNA
ttcactttcagactgaaaggctcctggg

SEQ ID NO: 3477 - DNA, 28 bp, synthetic construct
  source 1..28: mol_type = other DNA
tcactttcagactgaaaggctcctgggg

SEQ ID NO: 3478 - DNA, 28 bp, synthetic construct
  source 1..28: mol_type = other DNA
ggctcctggggaacttgcttcactccgg

SEQ ID NO: 3479 - DNA, 28 bp, synthetic construct
  source 1..28: mol_type = other DNA
agcgccggagtgaagcaagttccccagg

SEQ ID NO: 3480 - DNA, 28 bp, synthetic construct
  source 1..28: mol_type = other DNA
tccggcgctttctgtcccatgctgaagg

SEQ ID NO: 3481 - DNA, 28 bp, synthetic construct
  source 1..28: mol_type = other DNA
gccttcagcatgggacagaaagcgccgg

SEQ ID NO: 3482 - DNA, 28 bp, synthetic construct
  source 1..28: mol_type = other DNA
gcgctttctgtcccatgctgaaggctgg

SEQ ID NO: 3483 - DNA, 28 bp, synthetic construct
  source 1..28: mol_type = other DNA
ggctggcgactccagccttcagcatggg

SEQ ID NO: 3484 - DNA, 28 bp, synthetic construct
  source 1..28: mol_type = other DNA
gggctggcgactccagccttcagcatgg

SEQ ID NO: 3485 - DNA, 28 bp, synthetic construct
  source 1..28: mol_type = other DNA
ctgagaaaggcaaaggggaaggggctgg

SEQ ID NO: 3486 - DNA, 28 bp, synthetic construct
  source 1..28: mol_type = other DNA
cagccccttcccctttgcctttctcagg

SEQ ID NO: 3487 - DNA, 28 bp, synthetic construct
  source 1..28: mol_type = other DNA
gggcctgagaaaggcaaaggggaagggg

SEQ ID NO: 3488 - DNA, 28 bp, synthetic construct
  source 1..28: mol_type = other DNA
ggggcctgagaaaggcaaaggggaaggg

SEQ ID NO: 3489 - DNA, 28 bp, synthetic construct
  source 1..28: mol_type = other DNA
tggggcctgagaaaggcaaaggggaagg

SEQ ID NO: 3490 - DNA, 28 bp, synthetic construct
  source 1..28: mol_type = other DNA
ggactggggcctgagaaaggcaaagggg

SEQ ID NO: 3491 - DNA, 28 bp, synthetic construct
  source 1..28: mol_type = other DNA
gggactggggcctgagaaaggcaaaggg

SEQ ID NO: 3492 - DNA, 28 bp, synthetic construct
  source 1..28: mol_type = other DNA
agggactggggcctgagaaaggcaaagg

SEQ ID NO: 3493 - DNA, 28 bp, synthetic construct
  source 1..28: mol_type = other DNA
tgcctttctcaggccccagtccctgagg

SEQ ID NO: 3494 - DNA, 28 bp, synthetic construct
  source 1..28: mol_type = other DNA
cacctcagggactggggcctgagaaagg

SEQ ID NO: 3495 - DNA, 28 bp, synthetic construct
  source 1..28: mol_type = other DNA
ggccccagtccctgaggtgtgtgtgagg

SEQ ID NO: 3496 - DNA, 28 bp, synthetic construct
  source 1..28: mol_type = other DNA
gtcctcacacacacctcagggactgggg

SEQ ID NO: 3497 - DNA, 28 bp, synthetic construct
  source 1..28: mol_type = other DNA
agtcctcacacacacctcagggactggg

SEQ ID NO: 3498 - DNA, 28 bp, synthetic construct
  source 1..28: mol_type = other DNA
cagtcctcacacacacctcagggactgg

SEQ ID NO: 3499 - DNA, 28 bp, synthetic construct
  source 1..28: mol_type = other DNA
aagttcagtcctcacacacacctcaggg

SEQ ID NO: 3500 - DNA, 28 bp, synthetic construct
  source 1..28: mol_type = other DNA
aaagttcagtcctcacacacacctcagg

SEQ ID NO: 3501 - DNA, 28 bp, synthetic construct
  source 1..28: mol_type = other DNA
tgtgtgtgaggactgaactttaatccgg

SEQ ID NO: 3502 - DNA, 28 bp, synthetic construct
  source 1..28: mol_type = other DNA
gactgaactttaatccggaacaatctgg

SEQ ID NO: 3503 - DNA, 28 bp, synthetic construct
  source 1..28: mol_type = other DNA
aatccggaacaatctggtttctcctcgg

SEQ ID NO: 3504 - DNA, 28 bp, synthetic construct
  source 1..28: mol_type = other DNA
tgaccgaggagaaaccagattgttccgg

SEQ ID NO: 3505 - DNA, 28 bp, synthetic construct
  source 1..28: mol_type = other DNA
ctggtttctcctcggtcagcccagccgg

SEQ ID NO: 3506 - DNA, 28 bp, synthetic construct
  source 1..28: mol_type = other DNA
ggggaagcaccggctgggctgaccgagg

SEQ ID NO: 3507 - DNA, 28 bp, synthetic construct
  source 1..28: mol_type = other DNA
ggtgggggcgggggaagcaccggctggg

SEQ ID NO: 3508 - DNA, 28 bp, synthetic construct
  source 1..28: mol_type = other DNA
gggtgggggcgggggaagcaccggctgg

SEQ ID NO: 3509 - DNA, 28 bp, synthetic construct
  source 1..28: mol_type = other DNA
gcgtgggtgggggcgggggaagcaccgg

SEQ ID NO: 3510 - DNA, 28 bp, synthetic construct
  source 1..28: mol_type = other DNA
cccccgcccccacccacgctgcaagagg

SEQ ID NO: 3511 - DNA, 28 bp, synthetic construct
  source 1..28: mol_type = other DNA
gcctcttgcagcgtgggtgggggcgggg

SEQ ID NO: 3512 - DNA, 28 bp, synthetic construct
  source 1..28: mol_type = other DNA
cgcctcttgcagcgtgggtgggggcggg

SEQ ID NO: 3513 - DNA, 28 bp, synthetic construct
  source 1..28: mol_type = other DNA
tcgcctcttgcagcgtgggtgggggcgg

SEQ ID NO: 3514 - DNA, 28 bp, synthetic construct
  source 1..28: mol_type = other DNA
gcccccacccacgctgcaagaggcgagg

SEQ ID NO: 3515 - DNA, 28 bp, synthetic construct
  source 1..28: mol_type = other DNA
cccccacccacgctgcaagaggcgaggg

SEQ ID NO: 3516 - DNA, 28 bp, synthetic construct
  source 1..28: mol_type = other DNA
tccctcgcctcttgcagcgtgggtgggg

SEQ ID NO: 3517 - DNA, 28 bp, synthetic construct
  source 1..28: mol_type = other DNA
ctccctcgcctcttgcagcgtgggtggg

SEQ ID NO: 3518 - DNA, 28 bp, synthetic construct
  source 1..28: mol_type = other DNA
ccacccacgctgcaagaggcgagggagg

SEQ ID NO: 3519 - DNA, 28 bp, synthetic construct
  source 1..28: mol_type = other DNA
cacccacgctgcaagaggcgagggaggg

SEQ ID NO: 3520 - DNA, 28 bp, synthetic construct
  source 1..28: mol_type = other DNA
acccacgctgcaagaggcgagggagggg

SEQ ID NO: 3521 - DNA, 28 bp, synthetic construct
  source 1..28: mol_type = other DNA
acccctccctcgcctcttgcagcgtggg

SEQ ID NO: 3522 - DNA, 28 bp, synthetic construct
  source 1..28: mol_type = other DNA
cacccctccctcgcctcttgcagcgtgg

SEQ ID NO: 3523 - DNA, 28 bp, synthetic construct
  source 1..28: mol_type = other DNA
cacgctgcaagaggcgagggaggggtgg

SEQ ID NO: 3524 - DNA, 28 bp, synthetic construct
  source 1..28: mol_type = other DNA
gtgtgcatgtgtacatctgtccctgtgg

SEQ ID NO: 3525 - DNA, 28 bp, synthetic construct
  source 1..28: mol_type = other DNA
atgtgtacatctgtccctgtggtcccgg

SEQ ID NO: 3526 - DNA, 28 bp, synthetic construct
  source 1..28: mol_type = other DNA
tgtccctgtggtcccggcagctcgccgg

SEQ ID NO: 3527 - DNA, 28 bp, synthetic construct
  source 1..28: mol_type = other DNA
gtccctgtggtcccggcagctcgccggg

SEQ ID NO: 3528 - DNA, 28 bp, synthetic construct
  source 1..28: mol_type = other DNA
cacccggcgagctgccgggaccacaggg

SEQ ID NO: 3529 - DNA, 28 bp, synthetic construct
  source 1..28: mol_type = other DNA
cctgtggtcccggcagctcgccgggtgg

SEQ ID NO: 3530 - DNA, 28 bp, synthetic construct
  source 1..28: mol_type = other DNA
ctgtggtcccggcagctcgccgggtggg

SEQ ID NO: 3531 - DNA, 28 bp, synthetic construct
  source 1..28: mol_type = other DNA
tgtggtcccggcagctcgccgggtgggg

SEQ ID NO: 3532 - DNA, 28 bp, synthetic construct
  source 1..28: mol_type = other DNA
gtcccggcagctcgccgggtggggcagg

SEQ ID NO: 3533 - DNA, 28 bp, synthetic construct
  source 1..28: mol_type = other DNA
ttcctgccccacccggcgagctgccggg

SEQ ID NO: 3534 - DNA, 28 bp, synthetic construct
  source 1..28: mol_type = other DNA
gttcctgccccacccggcgagctgccgg

SEQ ID NO: 3535 - DNA, 28 bp, synthetic construct
  source 1..28: mol_type = other DNA
cgagacttctggttcctgccccacccgg

SEQ ID NO: 3536 - DNA, 28 bp, synthetic construct
  source 1..28: mol_type = other DNA
ggtggggcaggaaccagaagtctcgcgg

SEQ ID NO: 3537 - DNA, 28 bp, synthetic construct
  source 1..28: mol_type = other DNA
tgggggaaaggtgccgcgagacttctgg

SEQ ID NO: 3538 - DNA, 28 bp, synthetic construct
  source 1..28: mol_type = other DNA
ctcgcggcacctttcccccacccccagg

SEQ ID NO: 3539 - DNA, 28 bp, synthetic construct
  source 1..28: mol_type = other DNA
tgcaacacacctgggggtgggggaaagg

SEQ ID NO: 3540 - DNA, 28 bp, synthetic construct
  source 1..28: mol_type = other DNA
cccccacccccaggtgtgttgcaagtgg

SEQ ID NO: 3541 - DNA, 28 bp, synthetic construct
  source 1..28: mol_type = other DNA
gccacttgcaacacacctgggggtgggg

SEQ ID NO: 3542 - DNA, 28 bp, synthetic construct
  source 1..28: mol_type = other DNA
ggccacttgcaacacacctgggggtggg

SEQ ID NO: 3543 - DNA, 28 bp, synthetic construct
  source 1..28: mol_type = other DNA
aggccacttgcaacacacctgggggtgg

SEQ ID NO: 3544 - DNA, 28 bp, synthetic construct
  source 1..28: mol_type = other DNA
acccccaggtgtgttgcaagtggcctgg

SEQ ID NO: 3545 - DNA, 28 bp, synthetic construct
  source 1..28: mol_type = other DNA
gccaggccacttgcaacacacctggggg

SEQ ID NO: 3546 - DNA, 28 bp, synthetic construct
  source 1..28: mol_type = other DNA
ggccaggccacttgcaacacacctgggg

SEQ ID NO: 3547 - DNA, 28 bp, synthetic construct
  source 1..28: mol_type = other DNA
gggccaggccacttgcaacacacctggg

SEQ ID NO: 3548 - DNA, 28 bp, synthetic construct
  source 1..28: mol_type = other DNA
agggccaggccacttgcaacacacctgg

SEQ ID NO: 3549 - DNA, 28 bp, synthetic construct
  source 1..28: mol_type = other DNA
cacaggtgagtggtgcctctggaggtgg

SEQ ID NO: 3550 - DNA, 28 bp, synthetic construct
  source 1..28: mol_type = other DNA
acaggtgagtggtgcctctggaggtggg

SEQ ID NO: 3551 - DNA, 28 bp, synthetic construct
  source 1..28: mol_type = other DNA
gcaagggcagcacccccagcctccaagg

SEQ ID NO: 3552 - DNA, 28 bp, synthetic construct
  source 1..28: mol_type = other DNA
caagggcagcacccccagcctccaaggg

SEQ ID NO: 3553 - DNA, 28 bp, synthetic construct
  source 1..28: mol_type = other DNA
gcacccccagcctccaagggccgtcagg

SEQ ID NO: 3554 - DNA, 28 bp, synthetic construct
  source 1..28: mol_type = other DNA
cagcctgacggcccttggaggctggggg

SEQ ID NO: 3555 - DNA, 28 bp, synthetic construct
  source 1..28: mol_type = other DNA
ccccagcctccaagggccgtcaggctgg

SEQ ID NO: 3556 - DNA, 28 bp, synthetic construct
  source 1..28: mol_type = other DNA
cccagcctccaagggccgtcaggctggg

SEQ ID NO: 3557 - DNA, 28 bp, synthetic construct
  source 1..28: mol_type = other DNA
gcccagcctgacggcccttggaggctgg

SEQ ID NO: 3558 - DNA, 28 bp, synthetic construct
  source 1..28: mol_type = other DNA
caaagcccagcctgacggcccttggagg

SEQ ID NO: 3559 - DNA, 28 bp, synthetic construct
  source 1..28: mol_type = other DNA
ctccaagggccgtcaggctgggctttgg

SEQ ID NO: 3560 - DNA, 28 bp, synthetic construct
  source 1..28: mol_type = other DNA
tccaagggccgtcaggctgggctttggg

SEQ ID NO: 3561 - DNA, 28 bp, synthetic construct
  source 1..28: mol_type = other DNA
gcccaaagcccagcctgacggcccttgg

SEQ ID NO: 3562 - DNA, 28 bp, synthetic construct
  source 1..28: mol_type = other DNA
ctcaatggcccaaagcccagcctgacgg

SEQ ID NO: 3563 - DNA, 28 bp, synthetic construct
  source 1..28: mol_type = other DNA
tcagggctgggaatgggctgctcaatgg

SEQ ID NO: 3564 - DNA, 28 bp, synthetic construct
  source 1..28: mol_type = other DNA
attgagcagcccattcccagccctgagg

SEQ ID NO: 3565 - DNA, 28 bp, synthetic construct
  source 1..28: mol_type = other DNA
tggggtgggcctcagggctgggaatggg

SEQ ID NO: 3566 - DNA, 28 bp, synthetic construct
  source 1..28: mol_type = other DNA
ctggggtgggcctcagggctgggaatgg

SEQ ID NO: 3567 - DNA, 28 bp, synthetic construct
  source 1..28: mol_type = other DNA
ttcccagccctgaggcccaccccagagg

SEQ ID NO: 3568 - DNA, 28 bp, synthetic construct
  source 1..28: mol_type = other DNA
agcctctggggtgggcctcagggctggg

SEQ ID NO: 3569 - DNA, 28 bp, synthetic construct
  source 1..28: mol_type = other DNA
cagcctctggggtgggcctcagggctgg

SEQ ID NO: 3570 - DNA, 28 bp, synthetic construct
  source 1..28: mol_type = other DNA
cagccctgaggcccaccccagaggctgg

SEQ ID NO: 3571 - DNA, 28 bp, synthetic construct
  source 1..28: mol_type = other DNA
tgtccagcctctggggtgggcctcaggg

SEQ ID NO: 3572 - DNA, 28 bp, synthetic construct
  source 1..28: mol_type = other DNA
ctgtccagcctctggggtgggcctcagg

SEQ ID NO: 3573 - DNA, 28 bp, synthetic construct
  source 1..28: mol_type = other DNA
gaggcccaccccagaggctggacagagg

SEQ ID NO: 3574 - DNA, 28 bp, synthetic construct
  source 1..28: mol_type = other DNA
aggcccaccccagaggctggacagaggg

SEQ ID NO: 3575 - DNA, 28 bp, synthetic construct
  source 1..28: mol_type = other DNA
cccaccccagaggctggacagagggagg

SEQ ID NO: 3576 - DNA, 28 bp, synthetic construct
  source 1..28: mol_type = other DNA
tcctccctctgtccagcctctggggtgg

SEQ ID NO: 3577 - DNA, 28 bp, synthetic construct
  source 1..28: mol_type = other DNA
gaatcctccctctgtccagcctctgggg

SEQ ID NO: 3578 - DNA, 28 bp, synthetic construct
  source 1..28: mol_type = other DNA
tgaatcctccctctgtccagcctctggg

SEQ ID NO: 3579 - DNA, 28 bp, synthetic construct
  source 1..28: mol_type = other DNA
ttgaatcctccctctgtccagcctctgg

SEQ ID NO: 3580 - DNA, 28 bp, synthetic construct
  source 1..28: mol_type = other DNA
ggctggacagagggaggattcaagtcgg

SEQ ID NO: 3581 - DNA, 28 bp, synthetic construct
  source 1..28: mol_type = other DNA
gctggacagagggaggattcaagtcggg

SEQ ID NO: 3582 - DNA, 28 bp, synthetic construct
  source 1..28: mol_type = other DNA
gacagagggaggattcaagtcgggaagg

SEQ ID NO: 3583 - DNA, 28 bp, synthetic construct
  source 1..28: mol_type = other DNA
gaaacccacaaaccaaagatactgtagg

SEQ ID NO: 3584 - DNA, 28 bp, synthetic construct
  source 1..28: mol_type = other DNA
caatcctacagtatctttggtttgtggg

SEQ ID NO: 3585 - DNA, 28 bp, synthetic construct
  source 1..28: mol_type = other DNA
ccacaaaccaaagatactgtaggattgg

SEQ ID NO: 3586 - DNA, 28 bp, synthetic construct
  source 1..28: mol_type = other DNA
accaaagatactgtaggattggttctgg

SEQ ID NO: 3587 - DNA, 28 bp, synthetic construct
  source 1..28: mol_type = other DNA
gccagaaccaatcctacagtatctttgg

SEQ ID NO: 3588 - DNA, 28 bp, synthetic construct
  source 1..28: mol_type = other DNA
aggcagacagctagaggtgctgcatggg

SEQ ID NO: 3589 - DNA, 28 bp, synthetic construct
  source 1..28: mol_type = other DNA
gaggcagacagctagaggtgctgcatgg

SEQ ID NO: 3590 - DNA, 28 bp, synthetic construct
  source 1..28: mol_type = other DNA
cagcacctctagctgtctgcctcagtgg

SEQ ID NO: 3591 - DNA, 28 bp, synthetic construct
  source 1..28: mol_type = other DNA
agcacctctagctgtctgcctcagtggg

SEQ ID NO: 3592 - DNA, 28 bp, synthetic construct
  source 1..28: mol_type = other DNA
ctgacccactgaggcagacagctagagg

SEQ ID NO: 3593 - DNA, 28 bp, synthetic construct
  source 1..28: mol_type = other DNA
cagggtgatcgcttctgacccactgagg

SEQ ID NO: 3594 - DNA, 28 bp, synthetic construct
  source 1..28: mol_type = other DNA
tacagagatacaatgtgtatcaacaggg

SEQ ID NO: 3595 - DNA, 28 bp, synthetic construct
  source 1..28: mol_type = other DNA
ctacagagatacaatgtgtatcaacagg

SEQ ID NO: 3596 - DNA, 28 bp, synthetic construct
  source 1..28: mol_type = other DNA
atacacattgtatctctgtagtttaagg

SEQ ID NO: 3597 - DNA, 28 bp, synthetic construct
  source 1..28: mol_type = other DNA
tctctgtagtttaaggagacgctgccgg

SEQ ID NO: 3598 - DNA, 28 bp, synthetic construct
  source 1..28: mol_type = other DNA
tagtttaaggagacgctgccggtaacgg

SEQ ID NO: 3599 - DNA, 28 bp, synthetic construct
  source 1..28: mol_type = other DNA
aaggagacgctgccggtaacggcgtcgg

SEQ ID NO: 3600 - DNA, 28 bp, synthetic construct
  source 1..28: mol_type = other DNA
cgctgccggtaacggcgtcggtccgtgg

SEQ ID NO: 3601 - DNA, 28 bp, synthetic construct
  source 1..28: mol_type = other DNA
ctcagccacggaccgacgccgttaccgg

SEQ ID NO: 3602 - DNA, 28 bp, synthetic construct
  source 1..28: mol_type = other DNA
cggtaacggcgtcggtccgtggctgagg

SEQ ID NO: 3603 - DNA, 28 bp, synthetic construct
  source 1..28: mol_type = other DNA
gaaaagacggtttgggcctcagccacgg

SEQ ID NO: 3604 - DNA, 28 bp, synthetic construct
  source 1..28: mol_type = other DNA
aggcccaaaccgtcttttctctcagagg

SEQ ID NO: 3605 - DNA, 28 bp, synthetic construct
  source 1..28: mol_type = other DNA
ggcccaaaccgtcttttctctcagaggg

SEQ ID NO: 3606 - DNA, 28 bp, synthetic construct
  source 1..28: mol_type = other DNA
caccctctgagagaaaagacggtttggg

SEQ ID NO: 3607 - DNA, 28 bp, synthetic construct
  source 1..28: mol_type = other DNA
ccaaaccgtcttttctctcagagggtgg

SEQ ID NO: 3608 - DNA, 28 bp, synthetic construct
  source 1..28: mol_type = other DNA
caaaccgtcttttctctcagagggtggg

SEQ ID NO: 3609 - DNA, 28 bp, synthetic construct
  source 1..28: mol_type = other DNA
aaaccgtcttttctctcagagggtgggg

SEQ ID NO: 3610 - DNA, 28 bp, synthetic construct
  source 1..28: mol_type = other DNA
ccgtcttttctctcagagggtggggagg

SEQ ID NO: 3611 - DNA, 28 bp, synthetic construct
  source 1..28: mol_type = other DNA
cgtcttttctctcagagggtggggaggg

SEQ ID NO: 3612 - DNA, 28 bp, synthetic construct
  source 1..28: mol_type = other DNA
cttttctctcagagggtggggagggagg

SEQ ID NO: 3613 - DNA, 28 bp, synthetic construct
  source 1..28: mol_type = other DNA
ttctctcagagggtggggagggaggtgg

SEQ ID NO: 3614 - DNA, 28 bp, synthetic construct
  source 1..28: mol_type = other DNA
tctctcagagggtggggagggaggtggg

SEQ ID NO: 3615 - DNA, 28 bp, synthetic construct
  source 1..28: mol_type = other DNA
ctctcagagggtggggagggaggtgggg

SEQ ID NO: 3616 - DNA, 28 bp, synthetic construct
  source 1..28: mol_type = other DNA
tctcagagggtggggagggaggtggggg

SEQ ID NO: 3617 - DNA, 28 bp, synthetic construct
  source 1..28: mol_type = other DNA
gtggggagggaggtgggggcagcagagg

SEQ ID NO: 3618 - DNA, 28 bp, synthetic construct
  source 1..28: mol_type = other DNA
gagggaggtgggggcagcagaggcctgg

SEQ ID NO: 3619 - DNA, 28 bp, synthetic construct
  source 1..28: mol_type = other DNA
agggaggtgggggcagcagaggcctggg

SEQ ID NO: 3620 - DNA, 28 bp, synthetic construct
  source 1..28: mol_type = other DNA
aggtgggggcagcagaggcctgggctgg

SEQ ID NO: 3621 - DNA, 28 bp, synthetic construct
  source 1..28: mol_type = other DNA
ggtgggggcagcagaggcctgggctggg

SEQ ID NO: 3622 - DNA, 28 bp, synthetic construct
  source 1..28: mol_type = other DNA
gtggcgtgcacagggcacccagcccagg

SEQ ID NO: 3623 - DNA, 28 bp, synthetic construct
  source 1..28: mol_type = other DNA
gggcggaagtggggtggcgtgcacaggg

SEQ ID NO: 3624 - DNA, 28 bp, synthetic construct
  source 1..28: mol_type = other DNA
agggcggaagtggggtggcgtgcacagg

SEQ ID NO: 3625 - DNA, 28 bp, synthetic construct
  source 1..28: mol_type = other DNA
cgccaccccacttccgccctacccctgg

SEQ ID NO: 3626 - DNA, 28 bp, synthetic construct
  source 1..28: mol_type = other DNA
gccaccccacttccgccctacccctggg

SEQ ID NO: 3627 - DNA, 28 bp, synthetic construct
  source 1..28: mol_type = other DNA
tcccaggggtagggcggaagtggggtgg

SEQ ID NO: 3628 - DNA, 28 bp, synthetic construct
  source 1..28: mol_type = other DNA
acgtcccaggggtagggcggaagtgggg

SEQ ID NO: 3629 - DNA, 28 bp, synthetic construct
  source 1..28: mol_type = other DNA
aacgtcccaggggtagggcggaagtggg

SEQ ID NO: 3630 - DNA, 28 bp, synthetic construct
  source 1..28: mol_type = other DNA
caacgtcccaggggtagggcggaagtgg

SEQ ID NO: 3631 - DNA, 28 bp, synthetic construct
  source 1..28: mol_type = other DNA
cacttccgccctacccctgggacgttgg

SEQ ID NO: 3632 - DNA, 28 bp, synthetic construct
  source 1..28: mol_type = other DNA
caaggccaacgtcccaggggtagggcgg

SEQ ID NO: 3633 - DNA, 28 bp, synthetic construct
  source 1..28: mol_type = other DNA
cgccctacccctgggacgttggccttgg

SEQ ID NO: 3634 - DNA, 28 bp, synthetic construct
  source 1..28: mol_type = other DNA
agccaaggccaacgtcccaggggtaggg

SEQ ID NO: 3635 - DNA, 28 bp, synthetic construct
  source 1..28: mol_type = other DNA
cagccaaggccaacgtcccaggggtagg

SEQ ID NO: 3636 - DNA, 28 bp, synthetic construct
  source 1..28: mol_type = other DNA
ctacccctgggacgttggccttggctgg

SEQ ID NO: 3637 - DNA, 28 bp, synthetic construct
  source 1..28: mol_type = other DNA
tagccagccaaggccaacgtcccagggg

SEQ ID NO: 3638 - DNA, 28 bp, synthetic construct
  source 1..28: mol_type = other DNA
ctagccagccaaggccaacgtcccaggg

SEQ ID NO: 3639 - DNA, 28 bp, synthetic construct
  source 1..28: mol_type = other DNA
actagccagccaaggccaacgtcccagg

SEQ ID NO: 3640 - DNA, 28 bp, synthetic construct
  source 1..28: mol_type = other DNA
gggacgttggccttggctggctagttgg

SEQ ID NO: 3641 - DNA, 28 bp, synthetic construct
  source 1..28: mol_type = other DNA
ggacgttggccttggctggctagttggg

SEQ ID NO: 3642 - DNA, 28 bp, synthetic construct
  source 1..28: mol_type = other DNA
cacacggtgcccaactagccagccaagg

SEQ ID NO: 3643 - DNA, 28 bp, synthetic construct
  source 1..28: mol_type = other DNA
ttgggcaccgtgtgcctgccctccaagg

SEQ ID NO: 3644 - DNA, 28 bp, synthetic construct
  source 1..28: mol_type = other DNA
tgggcaccgtgtgcctgccctccaaggg

SEQ ID NO: 3645 - DNA, 28 bp, synthetic construct
  source 1..28: mol_type = other DNA
aggaggcccttggagggcaggcacacgg

SEQ ID NO: 3646 - DNA, 28 bp, synthetic construct
  source 1..28: mol_type = other DNA
ggcgtagaggaggcccttggagggcagg

SEQ ID NO: 3647 - DNA, 28 bp, synthetic construct
  source 1..28: mol_type = other DNA
cattggcgtagaggaggcccttggaggg

SEQ ID NO: 3648 - DNA, 28 bp, synthetic construct
  source 1..28: mol_type = other DNA
tcattggcgtagaggaggcccttggagg

SEQ ID NO: 3649 - DNA, 28 bp, synthetic construct
  source 1..28: mol_type = other DNA
tccaagggcctcctctacgccaatgagg

SEQ ID NO: 3650 - DNA, 28 bp, synthetic construct
  source 1..28: mol_type = other DNA
gcctcattggcgtagaggaggcccttgg

SEQ ID NO: 3651 - DNA, 28 bp, synthetic construct
  source 1..28: mol_type = other DNA
agatgaggcctcattggcgtagaggagg

SEQ ID NO: 3652 - DNA, 28 bp, synthetic construct
  source 1..28: mol_type = other DNA
cacagatgaggcctcattggcgtagagg

SEQ ID NO: 3653 - DNA, 28 bp, synthetic construct
  source 1..28: mol_type = other DNA
agcgagagcacagatgaggcctcattgg

SEQ ID NO: 3654 - DNA, 28 bp, synthetic construct
  source 1..28: mol_type = other DNA
aatgaggcctcatctgtgctctcgctgg

SEQ ID NO: 3655 - DNA, 28 bp, synthetic construct
  source 1..28: mol_type = other DNA
atgaggcctcatctgtgctctcgctggg

SEQ ID NO: 3656 - DNA, 28 bp, synthetic construct
  source 1..28: mol_type = other DNA
cacgtgcccagcgagagcacagatgagg

SEQ ID NO: 3657 - DNA, 28 bp, synthetic construct
  source 1..28: mol_type = other DNA
ctcatctgtgctctcgctgggcacgtgg

SEQ ID NO: 3658 - DNA, 28 bp, synthetic construct
  source 1..28: mol_type = other DNA
taaggaatagagtggggcagaaggtggg

SEQ ID NO: 3659 - DNA, 28 bp, synthetic construct
  source 1..28: mol_type = other DNA
ataaggaatagagtggggcagaaggtgg

SEQ ID NO: 3660 - DNA, 28 bp, synthetic construct
  source 1..28: mol_type = other DNA
aggataaggaatagagtggggcagaagg

SEQ ID NO: 3661 - DNA, 28 bp, synthetic construct
  source 1..28: mol_type = other DNA
gggcagcaggataaggaatagagtgggg

SEQ ID NO: 3662 - DNA, 28 bp, synthetic construct
  source 1..28: mol_type = other DNA
ggggcagcaggataaggaatagagtggg

SEQ ID NO: 3663 - DNA, 28 bp, synthetic construct
  source 1..28: mol_type = other DNA
aggggcagcaggataaggaatagagtgg

SEQ ID NO: 3664 - DNA, 28 bp, synthetic construct
  source 1..28: mol_type = other DNA
ctattccttatcctgctgcccctgtagg

SEQ ID NO: 3665 - DNA, 28 bp, synthetic construct
  source 1..28: mol_type = other DNA
tattccttatcctgctgcccctgtaggg

SEQ ID NO: 3666 - DNA, 28 bp, synthetic construct
  source 1..28: mol_type = other DNA
attccttatcctgctgcccctgtagggg

SEQ ID NO: 3667 - DNA, 28 bp, synthetic construct
  source 1..28: mol_type = other DNA
tgacccctacaggggcagcaggataagg

SEQ ID NO: 3668 - DNA, 28 bp, synthetic construct
  source 1..28: mol_type = other DNA
tatcctgctgcccctgtaggggtcaagg

SEQ ID NO: 3669 - DNA, 28 bp, synthetic construct
  source 1..28: mol_type = other DNA
atcctgctgcccctgtaggggtcaaggg

SEQ ID NO: 3670 - DNA, 28 bp, synthetic construct
  source 1..28: mol_type = other DNA
ggcccttgacccctacaggggcagcagg

SEQ ID NO: 3671 - DNA, 28 bp, synthetic construct
  source 1..28: mol_type = other DNA
gacggagggcccttgacccctacagggg

SEQ ID NO: 3672 - DNA, 28 bp, synthetic construct
  source 1..28: mol_type = other DNA
agacggagggcccttgacccctacaggg

SEQ ID NO: 3673 - DNA, 28 bp, synthetic construct
  source 1..28: mol_type = other DNA
tagacggagggcccttgacccctacagg

SEQ ID NO: 3674 - DNA, 28 bp, synthetic construct
  source 1..28: mol_type = other DNA
aggagaagaagagggtgtagacggaggg

SEQ ID NO: 3675 - DNA, 28 bp, synthetic construct
  source 1..28: mol_type = other DNA
gaggagaagaagagggtgtagacggagg

SEQ ID NO: 3676 - DNA, 28 bp, synthetic construct
  source 1..28: mol_type = other DNA
atggaggagaagaagagggtgtagacgg

SEQ ID NO: 3677 - DNA, 28 bp, synthetic construct
  source 1..28: mol_type = other DNA
gaataaaggatggaggagaagaagaggg

SEQ ID NO: 3678 - DNA, 28 bp, synthetic construct
  source 1..28: mol_type = other DNA
tgaataaaggatggaggagaagaagagg

SEQ ID NO: 3679 - DNA, 28 bp, synthetic construct
  source 1..28: mol_type = other DNA
cgagatgactctgaataaaggatggagg

SEQ ID NO: 3680 - DNA, 28 bp, synthetic construct
  source 1..28: mol_type = other DNA
gggcgagatgactctgaataaaggatgg

SEQ ID NO: 3681 - DNA, 28 bp, synthetic construct
  source 1..28: mol_type = other DNA
ggaagggcgagatgactctgaataaagg

SEQ ID NO: 3682 - DNA, 28 bp, synthetic construct
  source 1..28: mol_type = other DNA
ttcagagtcatctcgcccttccccatgg

SEQ ID NO: 3683 - DNA, 28 bp, synthetic construct
  source 1..28: mol_type = other DNA
tcagagtcatctcgcccttccccatggg

SEQ ID NO: 3684 - DNA, 28 bp, synthetic construct
  source 1..28: mol_type = other DNA
gagtcatctcgcccttccccatgggtgg

SEQ ID NO: 3685 - DNA, 28 bp, synthetic construct
  source 1..28: mol_type = other DNA
agtcatctcgcccttccccatgggtggg

SEQ ID NO: 3686 - DNA, 28 bp, synthetic construct
  source 1..28: mol_type = other DNA
gtcatctcgcccttccccatgggtgggg

SEQ ID NO: 3687 - DNA, 28 bp, synthetic construct
  source 1..28: mol_type = other DNA
tcatctcgcccttccccatgggtggggg

SEQ ID NO: 3688 - DNA, 28 bp, synthetic construct
  source 1..28: mol_type = other DNA
cacaggttcccccacccatggggaaggg

SEQ ID NO: 3689 - DNA, 28 bp, synthetic construct
  source 1..28: mol_type = other DNA
acacaggttcccccacccatggggaagg

SEQ ID NO: 3690 - DNA, 28 bp, synthetic construct
  source 1..28: mol_type = other DNA
acaaacacaggttcccccacccatgggg

SEQ ID NO: 3691 - DNA, 28 bp, synthetic construct
  source 1..28: mol_type = other DNA
aacaaacacaggttcccccacccatggg

SEQ ID NO: 3692 - DNA, 28 bp, synthetic construct
  source 1..28: mol_type = other DNA
aaacaaacacaggttcccccacccatgg

SEQ ID NO: 3693 - DNA, 28 bp, synthetic construct
  source 1..28: mol_type = other DNA
tttacatgtgcacacaaacaaacacagg

SEQ ID NO: 3694 - DNA, 28 bp, synthetic construct
  source 1..28: mol_type = other DNA
ctttattgatgtgttacaggaggtaagg

SEQ ID NO: 3695 - DNA, 28 bp, synthetic construct
  source 1..28: mol_type = other DNA
ttgtactttattgatgtgttacaggagg

SEQ ID NO: 3696 - DNA, 28 bp, synthetic construct
  source 1..28: mol_type = other DNA
tgattgtactttattgatgtgttacagg

SEQ ID NO: 3697 - DNA, 28 bp, synthetic construct
  source 1..28: mol_type = other DNA
taacaaagacaatcacctcttgaaaggg

SEQ ID NO: 3698 - DNA, 28 bp, synthetic construct
  source 1..28: mol_type = other DNA
ataacaaagacaatcacctcttgaaagg

SEQ ID NO: 3699 - RNA, 20 nt, synthetic construct
  source 1..20: mol_type = other RNA
cgcacacacacgcacaacct

SEQ ID NO: 3700 - RNA, 20 nt, synthetic construct
  source 1..20: mol_type = other RNA
acacacacgcacaacctagg

SEQ ID NO: 3701 - RNA, 20 nt, synthetic construct
  source 1..20: mol_type = other RNA
ggtcattggtgtagcctcct

SEQ ID NO: 3702 - RNA, 20 nt, synthetic construct
  source 1..20: mol_type = other RNA
ccaatgaccaccaccagccc

SEQ ID NO: 3703 - RNA, 20 nt, synthetic construct
  source 1..20: mol_type = other RNA
ccagggctggtggtggtcat

SEQ ID NO: 3704 - RNA, 20 nt, synthetic construct
  source 1..20: mol_type = other RNA
catgtggccagggctggtgg

SEQ ID NO: 3705 - RNA, 20 nt, synthetic construct
  source 1..20: mol_type = other RNA
ctgcatgtggccagggctgg

SEQ ID NO: 3706 - RNA, 20 nt, synthetic construct
  source 1..20: mol_type = other RNA
ccctggccacatgcagattc

SEQ ID NO: 3707 - RNA, 20 nt, synthetic construct
  source 1..20: mol_type = other RNA
aatctgcatgtggccagggc

SEQ ID NO: 3708 - RNA, 20 nt, synthetic construct
  source 1..20: mol_type = other RNA
cctggccacatgcagattca

SEQ ID NO: 3709 - RNA, 20 nt, synthetic construct
  source 1..20: mol_type = other RNA
cctgaatctgcatgtggcca

SEQ ID NO: 3710 - RNA, 20 nt, synthetic construct
  source 1..20: mol_type = other RNA
ccctgaatctgcatgtggcc

SEQ ID NO: 3711 - RNA, 20 nt, synthetic construct
  source 1..20: mol_type = other RNA
atgcagattcagggcactga

SEQ ID NO: 3712 - RNA, 20 nt, synthetic construct
  source 1..20: mol_type = other RNA
cagtgccctgaatctgcatg

SEQ ID NO: 3713 - RNA, 20 nt, synthetic construct
  source 1..20: mol_type = other RNA
tgcagattcagggcactgat

SEQ ID NO: 3714 - RNA, 20 nt, synthetic construct
  source 1..20: mol_type = other RNA
gcagattcagggcactgatg

SEQ ID NO: 3715 - RNA, 20 nt, synthetic construct
  source 1..20: mol_type = other RNA
gcactgatggggtgctaagc

SEQ ID NO: 3716 - RNA, 20 nt, synthetic construct
  source 1..20: mol_type = other RNA
cactgatggggtgctaagct

SEQ ID NO: 3717 - RNA, 20 nt, synthetic construct
  source 1..20: mol_type = other RNA
gtgctaagctgggctgattc

SEQ ID NO: 3718 - RNA, 20 nt, synthetic construct
  source 1..20: mol_type = other RNA
tgctaagctgggctgattct

SEQ ID NO: 3719 - RNA, 20 nt, synthetic construct
  source 1..20: mol_type = other RNA
ctgggccactccctgtgttc

SEQ ID NO: 3720 - RNA, 20 nt, synthetic construct
  source 1..20: mol_type = other RNA
ggccactccctgtgttcagg

SEQ ID NO: 3721 - RNA, 20 nt, synthetic construct
  source 1..20: mol_type = other RNA
aacctcctgaacacagggag

SEQ ID NO: 3722 - RNA, 20 nt, synthetic construct
  source 1..20: mol_type = other RNA
ctgtgttcaggaggttaata

SEQ ID NO: 3723 - RNA, 20 nt, synthetic construct
  source 1..20: mol_type = other RNA
ttattaacctcctgaacaca

SEQ ID NO: 3724 - RNA, 20 nt, synthetic construct
  source 1..20: mol_type = other RNA
cttattaacctcctgaacac

SEQ ID NO: 3725 - RNA, 20 nt, synthetic construct
  source 1..20: mol_type = other RNA
caggaggttaataaggacct

SEQ ID NO: 3726 - RNA, 20 nt, synthetic construct
  source 1..20: mol_type = other RNA
ataaggacctaggctctgcc

SEQ ID NO: 3727 - RNA, 20 nt, synthetic construct
  source 1..20: mol_type = other RNA
taaggacctaggctctgcct

SEQ ID NO: 3728 - RNA, 20 nt, synthetic construct
  source 1..20: mol_type = other RNA
aaggacctaggctctgcctg

SEQ ID NO: 3729 - RNA, 20 nt, synthetic construct
  source 1..20: mol_type = other RNA
taggctctgcctggggaaag

SEQ ID NO: 3730 - RNA, 20 nt, synthetic construct
  source 1..20: mol_type = other RNA
tctttccccaggcagagcct

SEQ ID NO: 3731 - RNA, 20 nt, synthetic construct
  source 1..20: mol_type = other RNA
gcctggggaaagaggtatcg

SEQ ID NO: 3732 - RNA, 20 nt, synthetic construct
  source 1..20: mol_type = other RNA
cctggggaaagaggtatcgt

SEQ ID NO: 3733 - RNA, 20 nt, synthetic construct
  source 1..20: mol_type = other RNA
ctggggaaagaggtatcgtg

SEQ ID NO: 3734 - RNA, 20 nt, synthetic construct
  source 1..20: mol_type = other RNA
cccacgatacctctttcccc

SEQ ID NO: 3735 - RNA, 20 nt, synthetic construct
  source 1..20: mol_type = other RNA
gaaagaggtatcgtggggcc

SEQ ID NO: 3736 - RNA, 20 nt, synthetic construct
  source 1..20: mol_type = other RNA
aaagaggtatcgtggggcca

SEQ ID NO: 3737 - RNA, 20 nt, synthetic construct
  source 1..20: mol_type = other RNA
gaggtatcgtggggccaggg

SEQ ID NO: 3738 - RNA, 20 nt, synthetic construct
  source 1..20: mol_type = other RNA
gtatcgtggggccagggagg

SEQ ID NO: 3739 - RNA, 20 nt, synthetic construct
  source 1..20: mol_type = other RNA
tatcgtggggccagggaggc

SEQ ID NO: 3740 - RNA, 20 nt, synthetic construct
  source 1..20: mol_type = other RNA
gtggggccagggaggcggga

SEQ ID NO: 3741 - RNA, 20 nt, synthetic construct
  source 1..20: mol_type = other RNA
tggggccagggaggcgggaa

SEQ ID NO: 3742 - RNA, 20 nt, synthetic construct
  source 1..20: mol_type = other RNA
ccagggaggcgggaagggac

SEQ ID NO: 3743 - RNA, 20 nt, synthetic construct
  source 1..20: mol_type = other RNA
cagggaggcgggaagggact

SEQ ID NO: 3744 - RNA, 20 nt, synthetic construct
  source 1..20: mol_type = other RNA
ccagtcccttcccgcctccc

SEQ ID NO: 3745 - RNA, 20 nt, synthetic construct
  source 1..20: mol_type = other RNA
gcgggaagggactgggcacc

SEQ ID NO: 3746 - RNA, 20 nt, synthetic construct
  source 1..20: mol_type = other RNA
cgggaagggactgggcacca

SEQ ID NO: 3747 - RNA, 20 nt, synthetic construct
  source 1..20: mol_type = other RNA
gactgggcaccagggcttcc

SEQ ID NO: 3748 - RNA, 20 nt, synthetic construct
  source 1..20: mol_type = other RNA
ggcttctctcctggaagccc

SEQ ID NO: 3749 - RNA, 20 nt, synthetic construct
  source 1..20: mol_type = other RNA
ctctcagacggcttctctcc

SEQ ID NO: 3750 - RNA, 20 nt, synthetic construct
  source 1..20: mol_type = other RNA
cgtctgagagctgtctgtag

SEQ ID NO: 3751 - RNA, 20 nt, synthetic construct
  source 1..20: mol_type = other RNA
gtctgagagctgtctgtaga

SEQ ID NO: 3752 - RNA, 20 nt, synthetic construct
  source 1..20: mol_type = other RNA
ctctacagacagctctcaga

SEQ ID NO: 3753 - RNA, 20 nt, synthetic construct
  source 1..20: mol_type = other RNA
gggcagtgtgtcccagtgtg

SEQ ID NO: 3754 - RNA, 20 nt, synthetic construct
  source 1..20: mol_type = other RNA
ttggttactggcctcacact

SEQ ID NO: 3755 - RNA, 20 nt, synthetic construct
  source 1..20: mol_type = other RNA
cttggttactggcctcacac

SEQ ID NO: 3756 - RNA, 20 nt, synthetic construct
  source 1..20: mol_type = other RNA
taggctgggcacttggttac

SEQ ID NO: 3757 - RNA, 20 nt, synthetic construct
  source 1..20: mol_type = other RNA
accaagtgcccagcctagcc

SEQ ID NO: 3758 - RNA, 20 nt, synthetic construct
  source 1..20: mol_type = other RNA
acctggctaggctgggcact

SEQ ID NO: 3759 - RNA, 20 nt, synthetic construct
  source 1..20: mol_type = other RNA
agcctagccaggtttttatg

SEQ ID NO: 3760 - RNA, 20 nt, synthetic construct
  source 1..20: mol_type = other RNA
cataaaaacctggctaggct

SEQ ID NO: 3761 - RNA, 20 nt, synthetic construct
  source 1..20: mol_type = other RNA
acataaaaacctggctaggc

SEQ ID NO: 3762 - RNA, 20 nt, synthetic construct
  source 1..20: mol_type = other RNA
ggccacataaaaacctggct

SEQ ID NO: 3763 - RNA, 20 nt, synthetic construct
  source 1..20: mol_type = other RNA
caaggggccacataaaaacc

SEQ ID NO: 3764 - RNA, 20 nt, synthetic construct
  source 1..20: mol_type = other RNA
tatgtggccccttgtgatgc

SEQ ID NO: 3765 - RNA, 20 nt, synthetic construct
  source 1..20: mol_type = other RNA
atgtggccccttgtgatgct

SEQ ID NO: 3766 - RNA, 20 nt, synthetic construct
  source 1..20: mol_type = other RNA
tgtggccccttgtgatgctg

SEQ ID NO: 3767 - RNA, 20 nt, synthetic construct
  source 1..20: mol_type = other RNA
aggagccccagcatcacaag

SEQ ID NO: 3768 - RNA, 20 nt, synthetic construct
  source 1..20: mol_type = other RNA
gaggagccccagcatcacaa

SEQ ID NO: 3769 - RNA, 20 nt, synthetic construct
  source 1..20: mol_type = other RNA
tgaggagccccagcatcaca

SEQ ID NO: 3770 - RNA, 20 nt, synthetic construct
  source 1..20: mol_type = other RNA
tttttgaatgaaggcatgtg

SEQ ID NO: 3771 - RNA, 20 nt, synthetic construct
  source 1..20: mol_type = other RNA
tgccttcattcaaaaataca

SEQ ID NO: 3772 - RNA, 20 nt, synthetic construct
  source 1..20: mol_type = other RNA
ctccgtgtatttttgaatga

SEQ ID NO: 3773 - RNA, 20 nt, synthetic construct
  source 1..20: mol_type = other RNA
caaaaatacacggagcagcc

SEQ ID NO: 3774 - RNA, 20 nt, synthetic construct
  source 1..20: mol_type = other RNA
gcagccaggcacctactcca

SEQ ID NO: 3775 - RNA, 20 nt, synthetic construct
  source 1..20: mol_type = other RNA
gaggccatggagtaggtgcc

SEQ ID NO: 3776 - RNA, 20 nt, synthetic construct
  source 1..20: mol_type = other RNA
gtcgtgcgaggccatggagt

SEQ ID NO: 3777 - RNA, 20 nt, synthetic construct
  source 1..20: mol_type = other RNA
ccatggcctcgcacgacaat

SEQ ID NO: 3778 - RNA, 20 nt, synthetic construct
  source 1..20: mol_type = other RNA
ccgattgtcgtgcgaggcca

SEQ ID NO: 3779 - RNA, 20 nt, synthetic construct
  source 1..20: mol_type = other RNA
gtgattccgattgtcgtgcg

SEQ ID NO: 3780 - RNA, 20 nt, synthetic construct
  source 1..20: mol_type = other RNA
tggtgggcggtcggtggtcg

SEQ ID NO: 3781 - RNA, 20 nt, synthetic construct
  source 1..20: mol_type = other RNA
atggtgggcggtcggtggtc

SEQ ID NO: 3782 - RNA, 20 nt, synthetic construct
  source 1..20: mol_type = other RNA
gatggtgggcggtcggtggt

SEQ ID NO: 3783 - RNA, 20 nt, synthetic construct
  source 1..20: mol_type = other RNA
ttgggatggtgggcggtcgg

SEQ ID NO: 3784 - RNA, 20 nt, synthetic construct
  source 1..20: mol_type = other RNA
ccgcccaccatcccaagccc

SEQ ID NO: 3785 - RNA, 20 nt, synthetic construct
  source 1..20: mol_type = other RNA
ggcttgggatggtgggcggt

SEQ ID NO: 3786 - RNA, 20 nt, synthetic construct
  source 1..20: mol_type = other RNA
ccggggcttgggatggtggg

SEQ ID NO: 3787 - RNA, 20 nt, synthetic construct
  source 1..20: mol_type = other RNA
cggccggggcttgggatggt

SEQ ID NO: 3788 - RNA, 20 nt, synthetic construct
  source 1..20: mol_type = other RNA
acggccggggcttgggatgg

SEQ ID NO: 3789 - RNA, 20 nt, synthetic construct
  source 1..20: mol_type = other RNA
cacacggccggggcttggga

SEQ ID NO: 3790 - RNA, 20 nt, synthetic construct
  source 1..20: mol_type = other RNA
ccaagccccggccgtgtgtg

SEQ ID NO: 3791 - RNA, 20 nt, synthetic construct
  source 1..20: mol_type = other RNA
agccccggccgtgtgtgtgg

SEQ ID NO: 3792 - RNA, 20 nt, synthetic construct
  source 1..20: mol_type = other RNA
cacacacacggccggggctt

SEQ ID NO: 3793 - RNA, 20 nt, synthetic construct
  source 1..20: mol_type = other RNA
gccccggccgtgtgtgtggt

SEQ ID NO: 3794 - RNA, 20 nt, synthetic construct
  source 1..20: mol_type = other RNA
ccacacacacggccggggct

SEQ ID NO: 3795 - RNA, 20 nt, synthetic construct
  source 1..20: mol_type = other RNA
cggccgtgtgtgtggtggga

SEQ ID NO: 3796 - RNA, 20 nt, synthetic construct
  source 1..20: mol_type = other RNA
tcccaccacacacacggccg

SEQ ID NO: 3797 - RNA, 20 nt, synthetic construct
  source 1..20: mol_type = other RNA
ttcccaccacacacacggcc

SEQ ID NO: 3798 - RNA, 20 nt, synthetic construct
  source 1..20: mol_type = other RNA
cttcccaccacacacacggc

SEQ ID NO: 3799 - RNA, 20 nt, synthetic construct
  source 1..20: mol_type = other RNA
ctgccttcccaccacacaca

SEQ ID NO: 3800 - RNA, 20 nt, synthetic construct
  source 1..20: mol_type = other RNA
ggtgggaaggcagtctttga

SEQ ID NO: 3801 - RNA, 20 nt, synthetic construct
  source 1..20: mol_type = other RNA
gtgggaaggcagtctttgaa

SEQ ID NO: 3802 - RNA, 20 nt, synthetic construct
  source 1..20: mol_type = other RNA
tttgaagggcagatgcctga

SEQ ID NO: 3803 - RNA, 20 nt, synthetic construct
  source 1..20: mol_type = other RNA
cagatgcctgacggagcagt

SEQ ID NO: 3804 - RNA, 20 nt, synthetic construct
  source 1..20: mol_type = other RNA
atgcctgacggagcagtagg

SEQ ID NO: 3805 - RNA, 20 nt, synthetic construct
  source 1..20: mol_type = other RNA
tgcctgacggagcagtagga

SEQ ID NO: 3806 - RNA, 20 nt, synthetic construct
  source 1..20: mol_type = other RNA
gcctgacggagcagtaggag

SEQ ID NO: 3807 - RNA, 20 nt, synthetic construct
  source 1..20: mol_type = other RNA
cctgacggagcagtaggagg

SEQ ID NO: 3808 - RNA, 20 nt, synthetic construct
  source 1..20: mol_type = other RNA
ccccctcctactgctccgtc

SEQ ID NO: 3809 - RNA, 20 nt, synthetic construct
  source 1..20: mol_type = other RNA
gtaggagggggaaatctatg

SEQ ID NO: 3810 - RNA, 20 nt, synthetic construct
  source 1..20: mol_type = other RNA
gagggggaaatctatgagga

SEQ ID NO: 3811 - RNA, 20 nt, synthetic construct
  source 1..20: mol_type = other RNA
agggggaaatctatgaggaa

SEQ ID NO: 3812 - RNA, 20 nt, synthetic construct
  source 1..20: mol_type = other RNA
gggggaaatctatgaggaag

SEQ ID NO: 3813 - RNA, 20 nt, synthetic construct
  source 1..20: mol_type = other RNA
gaaatctatgaggaaggggt

SEQ ID NO: 3814 - RNA, 20 nt, synthetic construct
  source 1..20: mol_type = other RNA
aaatctatgaggaaggggtc

SEQ ID NO: 3815 - RNA, 20 nt, synthetic construct
  source 1..20: mol_type = other RNA
aatctatgaggaaggggtcg

SEQ ID NO: 3816 - RNA, 20 nt, synthetic construct
  source 1..20: mol_type = other RNA
atctatgaggaaggggtcgg

SEQ ID NO: 3817 - RNA, 20 nt, synthetic construct
  source 1..20: mol_type = other RNA
tgaggaaggggtcgggggag

SEQ ID NO: 3818 - RNA, 20 nt, synthetic construct
  source 1..20: mol_type = other RNA
ggaaggggtcgggggagagg

SEQ ID NO: 3819 - RNA, 20 nt, synthetic construct
  source 1..20: mol_type = other RNA
gaaggggtcgggggagagga

SEQ ID NO: 3820 - RNA, 20 nt, synthetic construct
  source 1..20: mol_type = other RNA
ggtcgggggagaggagggct

SEQ ID NO: 3821 - RNA, 20 nt, synthetic construct
  source 1..20: mol_type = other RNA
gagaggagggctaggaaacc

SEQ ID NO: 3822 - RNA, 20 nt, synthetic construct
  source 1..20: mol_type = other RNA
gagggctaggaaaccaggtt

SEQ ID NO: 3823 - RNA, 20 nt, synthetic construct
  source 1..20: mol_type = other RNA
agggctaggaaaccaggttt

SEQ ID NO: 3824 - RNA, 20 nt, synthetic construct
  source 1..20: mol_type = other RNA
gggctaggaaaccaggtttg

SEQ ID NO: 3825 - RNA, 20 nt, synthetic construct
  source 1..20: mol_type = other RNA
acgtgatgaatccccaaacc

SEQ ID NO: 3826 - RNA, 20 nt, synthetic construct
  source 1..20: mol_type = other RNA
agaatgcaccattttttcac

SEQ ID NO: 3827 - RNA, 20 nt, synthetic construct
  source 1..20: mol_type = other RNA
gaatgcaccattttttcact

SEQ ID NO: 3828 - RNA, 20 nt, synthetic construct
  source 1..20: mol_type = other RNA
attggagcccagtgaaaaaa

SEQ ID NO: 3829 - RNA, 20 nt, synthetic construct
  source 1..20: mol_type = other RNA
gcagctggacgacatcaaat

SEQ ID NO: 3830 - RNA, 20 nt, synthetic construct
  source 1..20: mol_type = other RNA
attttggggagaggtgcagc

SEQ ID NO: 3831 - RNA, 20 nt, synthetic construct
  source 1..20: mol_type = other RNA
acctctccccaaaatgaaga

SEQ ID NO: 3832 - RNA, 20 nt, synthetic construct
  source 1..20: mol_type = other RNA
cctctccccaaaatgaagac

SEQ ID NO: 3833 - RNA, 20 nt, synthetic construct
  source 1..20: mol_type = other RNA
ctctccccaaaatgaagacg

SEQ ID NO: 3834 - RNA, 20 nt, synthetic construct
  source 1..20: mol_type = other RNA
cccgtcttcattttggggag

SEQ ID NO: 3835 - RNA, 20 nt, synthetic construct
  source 1..20: mol_type = other RNA
ccccaaaatgaagacgggga

SEQ ID NO: 3836 - RNA, 20 nt, synthetic construct
  source 1..20: mol_type = other RNA
ccttccccgtcttcattttg

SEQ ID NO: 3837 - RNA, 20 nt, synthetic construct
  source 1..20: mol_type = other RNA
gccttccccgtcttcatttt

SEQ ID NO: 3838 - RNA, 20 nt, synthetic construct
  source 1..20: mol_type = other RNA
cgccttccccgtcttcattt

SEQ ID NO: 3839 - RNA, 20 nt, synthetic construct
  source 1..20: mol_type = other RNA
agacggggaaggcgagatcc

SEQ ID NO: 3840 - RNA, 20 nt, synthetic construct
  source 1..20: mol_type = other RNA
cagattgggagctctggacc

SEQ ID NO: 3841 - RNA, 20 nt, synthetic construct
  source 1..20: mol_type = other RNA
ggcttgcagattgggagctc

SEQ ID NO: 3842 - RNA, 20 nt, synthetic construct
  source 1..20: mol_type = other RNA
tttgcaatggcttgcagatt

SEQ ID NO: 3843 - RNA, 20 nt, synthetic construct
  source 1..20: mol_type = other RNA
atttgcaatggcttgcagat

SEQ ID NO: 3844 - RNA, 20 nt, synthetic construct
  source 1..20: mol_type = other RNA
ggaggggctgggatttgcaa

SEQ ID NO: 3845 - RNA, 20 nt, synthetic construct
  source 1..20: mol_type = other RNA
actgaggctggggaggggct

SEQ ID NO: 3846 - RNA, 20 nt, synthetic construct
  source 1..20: mol_type = other RNA
aactgaggctggggaggggc

SEQ ID NO: 3847 - RNA, 20 nt, synthetic construct
  source 1..20: mol_type = other RNA
aagaaactgaggctggggag

SEQ ID NO: 3848 - RNA, 20 nt, synthetic construct
  source 1..20: mol_type = other RNA
gaagaaactgaggctgggga

SEQ ID NO: 3849 - RNA, 20 nt, synthetic construct
  source 1..20: mol_type = other RNA
ggaagaaactgaggctgggg

SEQ ID NO: 3850 - RNA, 20 nt, synthetic construct
  source 1..20: mol_type = other RNA
tgcggaagaaactgaggctg

SEQ ID NO: 3851 - RNA, 20 nt, synthetic construct
  source 1..20: mol_type = other RNA
gcctcagtttcttccgcagc

SEQ ID NO: 3852 - RNA, 20 nt, synthetic construct
  source 1..20: mol_type = other RNA
ctgcggaagaaactgaggct

SEQ ID NO: 3853 - RNA, 20 nt, synthetic construct
  source 1..20: mol_type = other RNA
cctcagtttcttccgcagcc

SEQ ID NO: 3854 - RNA, 20 nt, synthetic construct
  source 1..20: mol_type = other RNA
gctgcggaagaaactgaggc

SEQ ID NO: 3855 - RNA, 20 nt, synthetic construct
  source 1..20: mol_type = other RNA
cccggctgcggaagaaactg

SEQ ID NO: 3856 - RNA, 20 nt, synthetic construct
  source 1..20: mol_type = other RNA
tttcttccgcagccgggtag

SEQ ID NO: 3857 - RNA, 20 nt, synthetic construct
  source 1..20: mol_type = other RNA
ttcttccgcagccgggtagt

SEQ ID NO: 3858 - RNA, 20 nt, synthetic construct
  source 1..20: mol_type = other RNA
cagccgggtagtgggagcgc

SEQ ID NO: 3859 - RNA, 20 nt, synthetic construct
  source 1..20: mol_type = other RNA
agccgggtagtgggagcgca

SEQ ID NO: 3860 - RNA, 20 nt, synthetic construct
  source 1..20: mol_type = other RNA
gcgctcccactacccggctg

SEQ ID NO: 3861 - RNA, 20 nt, synthetic construct
  source 1..20: mol_type = other RNA
cgggtagtgggagcgcaggg

SEQ ID NO: 3862 - RNA, 20 nt, synthetic construct
  source 1..20: mol_type = other RNA
gggtagtgggagcgcaggga

SEQ ID NO: 3863 - RNA, 20 nt, synthetic construct
  source 1..20: mol_type = other RNA
ctccctgcgctcccactacc

SEQ ID NO: 3864 - RNA, 20 nt, synthetic construct
  source 1..20: mol_type = other RNA
gagcgcagggagggcagtcg

SEQ ID NO: 3865 - RNA, 20 nt, synthetic construct
  source 1..20: mol_type = other RNA
ggagggcagtcgaggccacc

SEQ ID NO: 3866 - RNA, 20 nt, synthetic construct
  source 1..20: mol_type = other RNA
gagggcagtcgaggccacca

SEQ ID NO: 3867 - RNA, 20 nt, synthetic construct
  source 1..20: mol_type = other RNA
aggccaccagggaccttgcc

SEQ ID NO: 3868 - RNA, 20 nt, synthetic construct
  source 1..20: mol_type = other RNA
gggccgggcaaggtccctgg

SEQ ID NO: 3869 - RNA, 20 nt, synthetic construct
  source 1..20: mol_type = other RNA
gcggggccgggcaaggtccc

SEQ ID NO: 3870 - RNA, 20 nt, synthetic construct
  source 1..20: mol_type = other RNA
aaactgggcggggccgggca

SEQ ID NO: 3871 - RNA, 20 nt, synthetic construct
  source 1..20: mol_type = other RNA
ccggccccgcccagtttccg

SEQ ID NO: 3872 - RNA, 20 nt, synthetic construct
  source 1..20: mol_type = other RNA
ctcggaaactgggcggggcc

SEQ ID NO: 3873 - RNA, 20 nt, synthetic construct
  source 1..20: mol_type = other RNA
cctcggaaactgggcggggc

SEQ ID NO: 3874 - RNA, 20 nt, synthetic construct
  source 1..20: mol_type = other RNA
ccgcccagtttccgaggaac

SEQ ID NO: 3875 - RNA, 20 nt, synthetic construct
  source 1..20: mol_type = other RNA
cgcccagtttccgaggaact

SEQ ID NO: 3876 - RNA, 20 nt, synthetic construct
  source 1..20: mol_type = other RNA
agttcctcggaaactgggcg

SEQ ID NO: 3877 - RNA, 20 nt, synthetic construct
  source 1..20: mol_type = other RNA
cagttcctcggaaactgggc

SEQ ID NO: 3878 - RNA, 20 nt, synthetic construct
  source 1..20: mol_type = other RNA
ccagttcctcggaaactggg

SEQ ID NO: 3879 - RNA, 20 nt, synthetic construct
  source 1..20: mol_type = other RNA
cagtttccgaggaactgggc

SEQ ID NO: 3880 - RNA, 20 nt, synthetic construct
  source 1..20: mol_type = other RNA
agtttccgaggaactgggcc

SEQ ID NO: 3881 - RNA, 20 nt, synthetic construct
  source 1..20: mol_type = other RNA
gtttccgaggaactgggccg

SEQ ID NO: 3882 - RNA, 20 nt, synthetic construct
  source 1..20: mol_type = other RNA
ggcccagttcctcggaaact

SEQ ID NO: 3883 - RNA, 20 nt, synthetic construct
  source 1..20: mol_type = other RNA
cggcccagttcctcggaaac

SEQ ID NO: 3884 - RNA, 20 nt, synthetic construct
  source 1..20: mol_type = other RNA
tccgaggaactgggccgggg

SEQ ID NO: 3885 - RNA, 20 nt, synthetic construct
  source 1..20: mol_type = other RNA
gaggaactgggccggggtgg

SEQ ID NO: 3886 - RNA, 20 nt, synthetic construct
  source 1..20: mol_type = other RNA
tccaccccggcccagttcct

SEQ ID NO: 3887 - RNA, 20 nt, synthetic construct
  source 1..20: mol_type = other RNA
cggcgcgggcgcctccaccc

SEQ ID NO: 3888 - RNA, 20 nt, synthetic construct
  source 1..20: mol_type = other RNA
gtggaggcgcccgcgccgcc

SEQ ID NO: 3889 - RNA, 20 nt, synthetic construct
  source 1..20: mol_type = other RNA
tggaggcgcccgcgccgcca

SEQ ID NO: 3890 - RNA, 20 nt, synthetic construct
  source 1..20: mol_type = other RNA
ggaggcgcccgcgccgccag

SEQ ID NO: 3891 - RNA, 20 nt, synthetic construct
  source 1..20: mol_type = other RNA
agaggaacccctggcggcgc

SEQ ID NO: 3892 - RNA, 20 nt, synthetic construct
  source 1..20: mol_type = other RNA
cagaggaacccctggcggcg

SEQ ID NO: 3893 - RNA, 20 nt, synthetic construct
  source 1..20: mol_type = other RNA
ggcttcagaggaacccctgg

SEQ ID NO: 3894 - RNA, 20 nt, synthetic construct
  source 1..20: mol_type = other RNA
aggggttcctctgaagcctg

SEQ ID NO: 3895 - RNA, 20 nt, synthetic construct
  source 1..20: mol_type = other RNA
acaggcttcagaggaacccc

SEQ ID NO: 3896 - RNA, 20 nt, synthetic construct
  source 1..20: mol_type = other RNA
ttcctctgaagcctgtggtc

SEQ ID NO: 3897 - RNA, 20 nt, synthetic construct
  source 1..20: mol_type = other RNA
ggcctgaccacaggcttcag

SEQ ID NO: 3898 - RNA, 20 nt, synthetic construct
  source 1..20: mol_type = other RNA
gtggtcaggccgccgcttcc

SEQ ID NO: 3899 - RNA, 20 nt, synthetic construct
  source 1..20: mol_type = other RNA
tggtcaggccgccgcttccc

SEQ ID NO: 3900 - RNA, 20 nt, synthetic construct
  source 1..20: mol_type = other RNA
ggaagcggcggcctgaccac

SEQ ID NO: 3901 - RNA, 20 nt, synthetic construct
  source 1..20: mol_type = other RNA
tcgggcttcccgggaagcgg

SEQ ID NO: 3902 - RNA, 20 nt, synthetic construct
  source 1..20: mol_type = other RNA
ggctcgggcttcccgggaag

SEQ ID NO: 3903 - RNA, 20 nt, synthetic construct
  source 1..20: mol_type = other RNA
ggtcttggctcgggcttccc

SEQ ID NO: 3904 - RNA, 20 nt, synthetic construct
  source 1..20: mol_type = other RNA
tggtcttggctcgggcttcc

SEQ ID NO: 3905 - RNA, 20 nt, synthetic construct
  source 1..20: mol_type = other RNA
cgagccaagaccagagaccg

SEQ ID NO: 3906 - RNA, 20 nt, synthetic construct
  source 1..20: mol_type = other RNA
gcggtctctggtcttggctc

SEQ ID NO: 3907 - RNA, 20 nt, synthetic construct
  source 1..20: mol_type = other RNA
cgcggtctctggtcttggct

SEQ ID NO: 3908 - RNA, 20 nt, synthetic construct
  source 1..20: mol_type = other RNA
ccaagaccagagaccgcggc

SEQ ID NO: 3909 - RNA, 20 nt, synthetic construct
  source 1..20: mol_type = other RNA
gaccagagaccgcggccggc

SEQ ID NO: 3910 - RNA, 20 nt, synthetic construct
  source 1..20: mol_type = other RNA
ccggccgcggtctctggtct

SEQ ID NO: 3911 - RNA, 20 nt, synthetic construct
  source 1..20: mol_type = other RNA
accagagaccgcggccggcc

SEQ ID NO: 3912 - RNA, 20 nt, synthetic construct
  source 1..20: mol_type = other RNA
ccagagaccgcggccggccg

SEQ ID NO: 3913 - RNA, 20 nt, synthetic construct
  source 1..20: mol_type = other RNA
ccccggccggccgcggtctc

SEQ ID NO: 3914 - RNA, 20 nt, synthetic construct
  source 1..20: mol_type = other RNA
accgcggccggccggggctt

SEQ ID NO: 3915 - RNA, 20 nt, synthetic construct
  source 1..20: mol_type = other RNA
ccgcggccggccggggcttc

SEQ ID NO: 3916 - RNA, 20 nt, synthetic construct
  source 1..20: mol_type = other RNA
cccgaagccccggccggccg

SEQ ID NO: 3917 - RNA, 20 nt, synthetic construct
  source 1..20: mol_type = other RNA
ggccggggcttcgggacagc

SEQ ID NO: 3918 - RNA, 20 nt, synthetic construct
  source 1..20: mol_type = other RNA
gccggggcttcgggacagca

SEQ ID NO: 3919 - RNA, 20 nt, synthetic construct
  source 1..20: mol_type = other RNA
tgctgtcccgaagccccggc

SEQ ID NO: 3920 - RNA, 20 nt, synthetic construct
  source 1..20: mol_type = other RNA
ggggcttcgggacagcaggg

SEQ ID NO: 3921 - RNA, 20 nt, synthetic construct
  source 1..20: mol_type = other RNA
gggcttcgggacagcagggc

SEQ ID NO: 3922 - RNA, 20 nt, synthetic construct
  source 1..20: mol_type = other RNA
gccctgctgtcccgaagccc

SEQ ID NO: 3923 - RNA, 20 nt, synthetic construct
  source 1..20: mol_type = other RNA
gacagcagggcgggcgactg

SEQ ID NO: 3924 - RNA, 20 nt, synthetic construct
  source 1..20: mol_type = other RNA
acagcagggcgggcgactga

SEQ ID NO: 3925 - RNA, 20 nt, synthetic construct
  source 1..20: mol_type = other RNA
cgggcgactgagggcgtcga

SEQ ID NO: 3926 - RNA, 20 nt, synthetic construct
  source 1..20: mol_type = other RNA
gcgactgagggcgtcgacgg

SEQ ID NO: 3927 - RNA, 20 nt, synthetic construct
  source 1..20: mol_type = other RNA
cgactgagggcgtcgacggc

SEQ ID NO: 3928 - RNA, 20 nt, synthetic construct
  source 1..20: mol_type = other RNA
ctgagggcgtcgacggcggg

SEQ ID NO: 3929 - RNA, 20 nt, synthetic construct
  source 1..20: mol_type = other RNA
gcgtcgacggcgggtggagc

SEQ ID NO: 3930 - RNA, 20 nt, synthetic construct
  source 1..20: mol_type = other RNA
cgtcgacggcgggtggagca

SEQ ID NO: 3931 - RNA, 20 nt, synthetic construct
  source 1..20: mol_type = other RNA
gtcgacggcgggtggagcag

SEQ ID NO: 3932 - RNA, 20 nt, synthetic construct
  source 1..20: mol_type = other RNA
cggcgggtggagcaggggct

SEQ ID NO: 3933 - RNA, 20 nt, synthetic construct
  source 1..20: mol_type = other RNA
cgggtggagcaggggctagg

SEQ ID NO: 3934 - RNA, 20 nt, synthetic construct
  source 1..20: mol_type = other RNA
gggtggagcaggggctagga

SEQ ID NO: 3935 - RNA, 20 nt, synthetic construct
  source 1..20: mol_type = other RNA
ggtggagcaggggctaggag

SEQ ID NO: 3936 - RNA, 20 nt, synthetic construct
  source 1..20: mol_type = other RNA
gtggagcaggggctaggagg

SEQ ID NO: 3937 - RNA, 20 nt, synthetic construct
  source 1..20: mol_type = other RNA
aggggctaggagggggtcta

SEQ ID NO: 3938 - RNA, 20 nt, synthetic construct
  source 1..20: mol_type = other RNA
ggggctaggagggggtctac

SEQ ID NO: 3939 - RNA, 20 nt, synthetic construct
  source 1..20: mol_type = other RNA
gctaggagggggtctacggg

SEQ ID NO: 3940 - RNA, 20 nt, synthetic construct
  source 1..20: mol_type = other RNA
ctaggagggggtctacgggt

SEQ ID NO: 3941 - RNA, 20 nt, synthetic construct
  source 1..20: mol_type = other RNA
taggagggggtctacgggtg

SEQ ID NO: 3942 - RNA, 20 nt, synthetic construct
  source 1..20: mol_type = other RNA
gggggtctacgggtggggtc

SEQ ID NO: 3943 - RNA, 20 nt, synthetic construct
  source 1..20: mol_type = other RNA
ctacgggtggggtcaggctc

SEQ ID NO: 3944 - RNA, 20 nt, synthetic construct
  source 1..20: mol_type = other RNA
tacgggtggggtcaggctca

SEQ ID NO: 3945 - RNA, 20 nt, synthetic construct
  source 1..20: mol_type = other RNA
ggtggggtcaggctcagggt

SEQ ID NO: 3946 - RNA, 20 nt, synthetic construct
  source 1..20: mol_type = other RNA
gtggggtcaggctcagggtt

SEQ ID NO: 3947 - RNA, 20 nt, synthetic construct
  source 1..20: mol_type = other RNA
tggggtcaggctcagggttg

SEQ ID NO: 3948 - RNA, 20 nt, synthetic construct
  source 1..20: mol_type = other RNA
agggttggggacaccttctg

SEQ ID NO: 3949 - RNA, 20 nt, synthetic construct
  source 1..20: mol_type = other RNA
gacaccttctgtggcctcct

SEQ ID NO: 3950 - RNA, 20 nt, synthetic construct
  source 1..20: mol_type = other RNA
acaccttctgtggcctccta

SEQ ID NO: 3951 - RNA, 20 nt, synthetic construct
  source 1..20: mol_type = other RNA
caccttctgtggcctcctag

SEQ ID NO: 3952 - RNA, 20 nt, synthetic construct
  source 1..20: mol_type = other RNA
accttctgtggcctcctagg

SEQ ID NO: 3953 - RNA, 20 nt, synthetic construct
  source 1..20: mol_type = other RNA
tccccctaggaggccacaga

SEQ ID NO: 3954 - RNA, 20 nt, synthetic construct
  source 1..20: mol_type = other RNA
tgtggcctcctagggggatc

SEQ ID NO: 3955 - RNA, 20 nt, synthetic construct
  source 1..20: mol_type = other RNA
tcctagggggatctggctgc

SEQ ID NO: 3956 - RNA, 20 nt, synthetic construct
  source 1..20: mol_type = other RNA
cctagggggatctggctgca

SEQ ID NO: 3957 - RNA, 20 nt, synthetic construct
  source 1..20: mol_type = other RNA
ctagggggatctggctgcag

SEQ ID NO: 3958 - RNA, 20 nt, synthetic construct
  source 1..20: mol_type = other RNA
tgcagccagatccccctagg

SEQ ID NO: 3959 - RNA, 20 nt, synthetic construct
  source 1..20: mol_type = other RNA
gggggatctggctgcagggg

SEQ ID NO: 3960 - RNA, 20 nt, synthetic construct
  source 1..20: mol_type = other RNA
ccctgcagccagatccccct

SEQ ID NO: 3961 - RNA, 20 nt, synthetic construct
  source 1..20: mol_type = other RNA
atctggctgcaggggaggag

SEQ ID NO: 3962 - RNA, 20 nt, synthetic construct
  source 1..20: mol_type = other RNA
gctgcaggggaggagaggac

SEQ ID NO: 3963 - RNA, 20 nt, synthetic construct
  source 1..20: mol_type = other RNA
ctgcaggggaggagaggaca

SEQ ID NO: 3964 - RNA, 20 nt, synthetic construct
  source 1..20: mol_type = other RNA
agaggacagggctctgcccc

SEQ ID NO: 3965 - RNA, 20 nt, synthetic construct
  source 1..20: mol_type = other RNA
ggacagggctctgcccccgg

SEQ ID NO: 3966 - RNA, 20 nt, synthetic construct
  source 1..20: mol_type = other RNA
gacagggctctgcccccggc

SEQ ID NO: 3967 - RNA, 20 nt, synthetic construct
  source 1..20: mol_type = other RNA
ggctctgcccccggcgggtg

SEQ ID NO: 3968 - RNA, 20 nt, synthetic construct
  source 1..20: mol_type = other RNA
ccggcgggtgtggagacagc

SEQ ID NO: 3969 - RNA, 20 nt, synthetic construct
  source 1..20: mol_type = other RNA
cggcgggtgtggagacagct

SEQ ID NO: 3970 - RNA, 20 nt, synthetic construct
  source 1..20: mol_type = other RNA
gctgtctccacacccgccgg

SEQ ID NO: 3971 - RNA, 20 nt, synthetic construct
  source 1..20: mol_type = other RNA
ggcgggtgtggagacagctg

SEQ ID NO: 3972 - RNA, 20 nt, synthetic construct
  source 1..20: mol_type = other RNA
agctgtctccacacccgccg

SEQ ID NO: 3973 - RNA, 20 nt, synthetic construct
  source 1..20: mol_type = other RNA
cagctgtctccacacccgcc

SEQ ID NO: 3974 - RNA, 20 nt, synthetic construct
  source 1..20: mol_type = other RNA
ccagctgtctccacacccgc

SEQ ID NO: 3975 - RNA, 20 nt, synthetic construct
  source 1..20: mol_type = other RNA
gggtgtggagacagctgggg

SEQ ID NO: 3976 - RNA, 20 nt, synthetic construct
  source 1..20: mol_type = other RNA
tgtggagacagctggggcgg

SEQ ID NO: 3977 - RNA, 20 nt, synthetic construct
  source 1..20: mol_type = other RNA
ggagacagctggggcggagg

SEQ ID NO: 3978 - RNA, 20 nt, synthetic construct
  source 1..20: mol_type = other RNA
gagacagctggggcggagga

SEQ ID NO: 3979 - RNA, 20 nt, synthetic construct
  source 1..20: mol_type = other RNA
ggggcggaggagggtgtgtc

SEQ ID NO: 3980 - RNA, 20 nt, synthetic construct
  source 1..20: mol_type = other RNA
gggcggaggagggtgtgtca

SEQ ID NO: 3981 - RNA, 20 nt, synthetic construct
  source 1..20: mol_type = other RNA
gtgtcagggcgcgtcccaag

SEQ ID NO: 3982 - RNA, 20 nt, synthetic construct
  source 1..20: mol_type = other RNA
tgtcagggcgcgtcccaaga

SEQ ID NO: 3983 - RNA, 20 nt, synthetic construct
  source 1..20: mol_type = other RNA
gggcgcgtcccaagagggcc

SEQ ID NO: 3984 - RNA, 20 nt, synthetic construct
  source 1..20: mol_type = other RNA
cgcgtcccaagagggcctgg

SEQ ID NO: 3985 - RNA, 20 nt, synthetic construct
  source 1..20: mol_type = other RNA
ttctgccgccaggccctctt

SEQ ID NO: 3986 - RNA, 20 nt, synthetic construct
  source 1..20: mol_type = other RNA
gagggcctggcggcagaaag

SEQ ID NO: 3987 - RNA, 20 nt, synthetic construct
  source 1..20: mol_type = other RNA
tttctgccgccaggccctct

SEQ ID NO: 3988 - RNA, 20 nt, synthetic construct
  source 1..20: mol_type = other RNA
gcggcagaaagtggaacccg

SEQ ID NO: 3989 - RNA, 20 nt, synthetic construct
  source 1..20: mol_type = other RNA
gggttccactttctgccgcc

SEQ ID NO: 3990 - RNA, 20 nt, synthetic construct
  source 1..20: mol_type = other RNA
gaaagtggaacccgaggtag

SEQ ID NO: 3991 - RNA, 20 nt, synthetic construct
  source 1..20: mol_type = other RNA
aaagtggaacccgaggtagc

SEQ ID NO: 3992 - RNA, 20 nt, synthetic construct
  source 1..20: mol_type = other RNA
aagtggaacccgaggtagcg

SEQ ID NO: 3993 - RNA, 20 nt, synthetic construct
  source 1..20: mol_type = other RNA
ccgaggtagcggggcaaaat

SEQ ID NO: 3994 - RNA, 20 nt, synthetic construct
  source 1..20: mol_type = other RNA
cgaggtagcggggcaaaatc

SEQ ID NO: 3995 - RNA, 20 nt, synthetic construct
  source 1..20: mol_type = other RNA
gaggtagcggggcaaaatcg

SEQ ID NO: 3996 - RNA, 20 nt, synthetic construct
  source 1..20: mol_type = other RNA
cgattttgccccgctacctc

SEQ ID NO: 3997 - RNA, 20 nt, synthetic construct
  source 1..20: mol_type = other RNA
ccgattttgccccgctacct

SEQ ID NO: 3998 - RNA, 20 nt, synthetic construct
  source 1..20: mol_type = other RNA
atcggggtcgccaagtccga

SEQ ID NO: 3999 - RNA, 20 nt, synthetic construct
  source 1..20: mol_type = other RNA
ggggtcgccaagtccgaagg

SEQ ID NO: 4000 - RNA, 20 nt, synthetic construct
  source 1..20: mol_type = other RNA
gggtcgccaagtccgaagga

SEQ ID NO: 4001 - RNA, 20 nt, synthetic construct
  source 1..20: mol_type = other RNA
ggtcgccaagtccgaaggag

SEQ ID NO: 4002 - RNA, 20 nt, synthetic construct
  source 1..20: mol_type = other RNA
tcggacccctccttcggact

SEQ ID NO: 4003 - RNA, 20 nt, synthetic construct
  source 1..20: mol_type = other RNA
cgaaggaggggtccgagaag

SEQ ID NO: 4004 - RNA, 20 nt, synthetic construct
  source 1..20: mol_type = other RNA
cacttctcggacccctcctt

SEQ ID NO: 4005 - RNA, 20 nt, synthetic construct
  source 1..20: mol_type = other RNA
ggaggggtccgagaagtggc

SEQ ID NO: 4006 - RNA, 20 nt, synthetic construct
  source 1..20: mol_type = other RNA
gggtccgagaagtggccgga

SEQ ID NO: 4007 - RNA, 20 nt, synthetic construct
  source 1..20: mol_type = other RNA
gagaagtggccggaaggcgc

SEQ ID NO: 4008 - RNA, 20 nt, synthetic construct
  source 1..20: mol_type = other RNA
agaagtggccggaaggcgca

SEQ ID NO: 4009 - RNA, 20 nt, synthetic construct
  source 1..20: mol_type = other RNA
tgcgccttccggccacttct

SEQ ID NO: 4010 - RNA, 20 nt, synthetic construct
  source 1..20: mol_type = other RNA
gtggccggaaggcgcagggt

SEQ ID NO: 4011 - RNA, 20 nt, synthetic construct
  source 1..20: mol_type = other RNA
tggccggaaggcgcagggtc

SEQ ID NO: 4012 - RNA, 20 nt, synthetic construct
  source 1..20: mol_type = other RNA
ggccggaaggcgcagggtcg

SEQ ID NO: 4013 - RNA, 20 nt, synthetic construct
  source 1..20: mol_type = other RNA
ggccccgaccctgcgccttc

SEQ ID NO: 4014 - RNA, 20 nt, synthetic construct
  source 1..20: mol_type = other RNA
cggggccagagcccctcgag

SEQ ID NO: 4015 - RNA, 20 nt, synthetic construct
  source 1..20: mol_type = other RNA
ggccagagcccctcgagagg

SEQ ID NO: 4016 - RNA, 20 nt, synthetic construct
  source 1..20: mol_type = other RNA
gccagagcccctcgagaggc

SEQ ID NO: 4017 - RNA, 20 nt, synthetic construct
  source 1..20: mol_type = other RNA
acccgcctctcgaggggctc

SEQ ID NO: 4018 - RNA, 20 nt, synthetic construct
  source 1..20: mol_type = other RNA
gcccctcgagaggcgggtgc

SEQ ID NO: 4019 - RNA, 20 nt, synthetic construct
  source 1..20: mol_type = other RNA
cccctcgagaggcgggtgct

SEQ ID NO: 4020 - RNA, 20 nt, synthetic construct
  source 1..20: mol_type = other RNA
ccctcgagaggcgggtgctg

SEQ ID NO: 4021 - RNA, 20 nt, synthetic construct
  source 1..20: mol_type = other RNA
cccagcacccgcctctcgag

SEQ ID NO: 4022 - RNA, 20 nt, synthetic construct
  source 1..20: mol_type = other RNA
cgagaggcgggtgctggggc

SEQ ID NO: 4023 - RNA, 20 nt, synthetic construct
  source 1..20: mol_type = other RNA
ccccagcacccgcctctcga

SEQ ID NO: 4024 - RNA, 20 nt, synthetic construct
  source 1..20: mol_type = other RNA
gccccagcacccgcctctcg

SEQ ID NO: 4025 - RNA, 20 nt, synthetic construct
  source 1..20: mol_type = other RNA
gtgctggggcaggtgcgaac

SEQ ID NO: 4026 - RNA, 20 nt, synthetic construct
  source 1..20: mol_type = other RNA
ctggggcaggtgcgaacagg

SEQ ID NO: 4027 - RNA, 20 nt, synthetic construct
  source 1..20: mol_type = other RNA
tggggcaggtgcgaacaggc

SEQ ID NO: 4028 - RNA, 20 nt, synthetic construct
  source 1..20: mol_type = other RNA
aggtgcgaacaggcgggcag

SEQ ID NO: 4029 - RNA, 20 nt, synthetic construct
  source 1..20: mol_type = other RNA
ggtgcgaacaggcgggcaga

SEQ ID NO: 4030 - RNA, 20 nt, synthetic construct
  source 1..20: mol_type = other RNA
caggcgggcagagggccccg

SEQ ID NO: 4031 - RNA, 20 nt, synthetic construct
  source 1..20: mol_type = other RNA
aggcgggcagagggccccgc

SEQ ID NO: 4032 - RNA, 20 nt, synthetic construct
  source 1..20: mol_type = other RNA
cgggcagagggccccgcggg

SEQ ID NO: 4033 - RNA, 20 nt, synthetic construct
  source 1..20: mol_type = other RNA
gggcagagggccccgcggga

SEQ ID NO: 4034 - RNA, 20 nt, synthetic construct
  source 1..20: mol_type = other RNA
cgcgggagggtccagaagag

SEQ ID NO: 4035 - RNA, 20 nt, synthetic construct
  source 1..20: mol_type = other RNA
gcgggagggtccagaagaga

SEQ ID NO: 4036 - RNA, 20 nt, synthetic construct
  source 1..20: mol_type = other RNA
ctcttctggaccctcccgcg

SEQ ID NO: 4037 - RNA, 20 nt, synthetic construct
  source 1..20: mol_type = other RNA
tctcttctggaccctcccgc

SEQ ID NO: 4038 - RNA, 20 nt, synthetic construct
  source 1..20: mol_type = other RNA
ctctcttctggaccctcccg

SEQ ID NO: 4039 - RNA, 20 nt, synthetic construct
  source 1..20: mol_type = other RNA
ggtccagaagagagggaaac

SEQ ID NO: 4040 - RNA, 20 nt, synthetic construct
  source 1..20: mol_type = other RNA
gtccagaagagagggaaaca

SEQ ID NO: 4041 - RNA, 20 nt, synthetic construct
  source 1..20: mol_type = other RNA
ggccctgtttccctctcttc

SEQ ID NO: 4042 - RNA, 20 nt, synthetic construct
  source 1..20: mol_type = other RNA
agagggaaacagggccgaag

SEQ ID NO: 4043 - RNA, 20 nt, synthetic construct
  source 1..20: mol_type = other RNA
agggccgaagcggtcctcgc

SEQ ID NO: 4044 - RNA, 20 nt, synthetic construct
  source 1..20: mol_type = other RNA
gcgtccggcgaggaccgctt

SEQ ID NO: 4045 - RNA, 20 nt, synthetic construct
  source 1..20: mol_type = other RNA
gtcctcgccggacgccaccg

SEQ ID NO: 4046 - RNA, 20 nt, synthetic construct
  source 1..20: mol_type = other RNA
ttccgcggtggcgtccggcg

SEQ ID NO: 4047 - RNA, 20 nt, synthetic construct
  source 1..20: mol_type = other RNA
tctctttccgcggtggcgtc

SEQ ID NO: 4048 - RNA, 20 nt, synthetic construct
  source 1..20: mol_type = other RNA
tttggtttctctttccgcgg

SEQ ID NO: 4049 - RNA, 20 nt, synthetic construct
  source 1..20: mol_type = other RNA
gcggaaagagaaaccaaaag

SEQ ID NO: 4050 - RNA, 20 nt, synthetic construct
  source 1..20: mol_type = other RNA
acttttggtttctctttccg

SEQ ID NO: 4051 - RNA, 20 nt, synthetic construct
  source 1..20: mol_type = other RNA
agagaaaccaaaagtggagc

SEQ ID NO: 4052 - RNA, 20 nt, synthetic construct
  source 1..20: mol_type = other RNA
gagaaaccaaaagtggagct

SEQ ID NO: 4053 - RNA, 20 nt, synthetic construct
  source 1..20: mol_type = other RNA
agaaaccaaaagtggagctg

SEQ ID NO: 4054 - RNA, 20 nt, synthetic construct
  source 1..20: mol_type = other RNA
gaaaccaaaagtggagctgg

SEQ ID NO: 4055 - RNA, 20 nt, synthetic construct
  source 1..20: mol_type = other RNA
accaaaagtggagctggggg

SEQ ID NO: 4056 - RNA, 20 nt, synthetic construct
  source 1..20: mol_type = other RNA
ccaaaagtggagctgggggc

SEQ ID NO: 4057 - RNA, 20 nt, synthetic construct
  source 1..20: mol_type = other RNA
caaaagtggagctgggggcg

SEQ ID NO: 4058 - RNA, 20 nt, synthetic construct
  source 1..20: mol_type = other RNA
cccgcccccagctccacttt

SEQ ID NO: 4059 - RNA, 20 nt, synthetic construct
  source 1..20: mol_type = other RNA
agtggagctgggggcggggc

SEQ ID NO: 4060 - RNA, 20 nt, synthetic construct
  source 1..20: mol_type = other RNA
gagctgggggcggggccggc

SEQ ID NO: 4061 - RNA, 20 nt, synthetic construct
  source 1..20: mol_type = other RNA
agctgggggcggggccggca

SEQ ID NO: 4062 - RNA, 20 nt, synthetic construct
  source 1..20: mol_type = other RNA
gctgggggcggggccggcag

SEQ ID NO: 4063 - RNA, 20 nt, synthetic construct
  source 1..20: mol_type = other RNA
ctgggggcggggccggcagg

SEQ ID NO: 4064 - RNA, 20 nt, synthetic construct
  source 1..20: mol_type = other RNA
ggggcggggccggcaggggg

SEQ ID NO: 4065 - RNA, 20 nt, synthetic construct
  source 1..20: mol_type = other RNA
gggcggggccggcagggggc

SEQ ID NO: 4066 - RNA, 20 nt, synthetic construct
  source 1..20: mol_type = other RNA
ggcggggccggcagggggcg

SEQ ID NO: 4067 - RNA, 20 nt, synthetic construct
  source 1..20: mol_type = other RNA
cgggaggccccgccccctgc

SEQ ID NO: 4068 - RNA, 20 nt, synthetic construct
  source 1..20: mol_type = other RNA
gcggggctggcgacggcggg

SEQ ID NO: 4069 - RNA, 20 nt, synthetic construct
  source 1..20: mol_type = other RNA
gaggcggggctggcgacggc

SEQ ID NO: 4070 - RNA, 20 nt, synthetic construct
  source 1..20: mol_type = other RNA
ggaggcggggctggcgacgg

SEQ ID NO: 4071 - RNA, 20 nt, synthetic construct
  source 1..20: mol_type = other RNA
cgccagccccgcctccgagc

SEQ ID NO: 4072 - RNA, 20 nt, synthetic construct
  source 1..20: mol_type = other RNA
ctcggaggcggggctggcga

SEQ ID NO: 4073 - RNA, 20 nt, synthetic construct
  source 1..20: mol_type = other RNA
aaccggctcggaggcggggc

SEQ ID NO: 4074 - RNA, 20 nt, synthetic construct
  source 1..20: mol_type = other RNA
tttaaaccggctcggaggcg

SEQ ID NO: 4075 - RNA, 20 nt, synthetic construct
  source 1..20: mol_type = other RNA
ttttaaaccggctcggaggc

SEQ ID NO: 4076 - RNA, 20 nt, synthetic construct
  source 1..20: mol_type = other RNA
cttttaaaccggctcggagg

SEQ ID NO: 4077 - RNA, 20 nt, synthetic construct
  source 1..20: mol_type = other RNA
tccgagccggtttaaaagac

SEQ ID NO: 4078 - RNA, 20 nt, synthetic construct
  source 1..20: mol_type = other RNA
agtcttttaaaccggctcgg

SEQ ID NO: 4079 - RNA, 20 nt, synthetic construct
  source 1..20: mol_type = other RNA
gccagtcttttaaaccggct

SEQ ID NO: 4080 - RNA, 20 nt, synthetic construct
  source 1..20: mol_type = other RNA
ccggtttaaaagactggcgc

SEQ ID NO: 4081 - RNA, 20 nt, synthetic construct
  source 1..20: mol_type = other RNA
cggtttaaaagactggcgca

SEQ ID NO: 4082 - RNA, 20 nt, synthetic construct
  source 1..20: mol_type = other RNA
ggtttaaaagactggcgcag

SEQ ID NO: 4083 - RNA, 20 nt, synthetic construct
  source 1..20: mol_type = other RNA
cctgcgccagtcttttaaac

SEQ ID NO: 4084 - RNA, 20 nt, synthetic construct
  source 1..20: mol_type = other RNA
ttaaaagactggcgcagggg

SEQ ID NO: 4085 - RNA, 20 nt, synthetic construct
  source 1..20: mol_type = other RNA
taaaagactggcgcaggggc

SEQ ID NO: 4086 - RNA, 20 nt, synthetic construct
  source 1..20: mol_type = other RNA
gcgccgaacagagcgagctg

SEQ ID NO: 4087 - RNA, 20 nt, synthetic construct
  source 1..20: mol_type = other RNA
aacagagcgagctgcggccg

SEQ ID NO: 4088 - RNA, 20 nt, synthetic construct
  source 1..20: mol_type = other RNA
cggccgcagctcgctctgtt

SEQ ID NO: 4089 - RNA, 20 nt, synthetic construct
  source 1..20: mol_type = other RNA
ctgcggccgtggcagctgca

SEQ ID NO: 4090 - RNA, 20 nt, synthetic construct
  source 1..20: mol_type = other RNA
cgtggcagctgcacggctcc

SEQ ID NO: 4091 - RNA, 20 nt, synthetic construct
  source 1..20: mol_type = other RNA
caggagccgtgcagctgcca

SEQ ID NO: 4092 - RNA, 20 nt, synthetic construct
  source 1..20: mol_type = other RNA
agctgcacggctcctggccc

SEQ ID NO: 4093 - RNA, 20 nt, synthetic construct
  source 1..20: mol_type = other RNA
ctcgcgcatgctccggggcc

SEQ ID NO: 4094 - RNA, 20 nt, synthetic construct
  source 1..20: mol_type = other RNA
cggctctcgcgcatgctccg

SEQ ID NO: 4095 - RNA, 20 nt, synthetic construct
  source 1..20: mol_type = other RNA
gcggctctcgcgcatgctcc

SEQ ID NO: 4096 - RNA, 20 nt, synthetic construct
  source 1..20: mol_type = other RNA
agcatgcgcgagagccgccc

SEQ ID NO: 4097 - RNA, 20 nt, synthetic construct
  source 1..20: mol_type = other RNA
ggcggctctcgcgcatgctc

SEQ ID NO: 4098 - RNA, 20 nt, synthetic construct
  source 1..20: mol_type = other RNA
agagccgccccggagcgccc

SEQ ID NO: 4099 - RNA, 20 nt, synthetic construct
  source 1..20: mol_type = other RNA
ggctccggggcgctccgggg

SEQ ID NO: 4100 - RNA, 20 nt, synthetic construct
  source 1..20: mol_type = other RNA
gggggctccggggcgctccg

SEQ ID NO: 4101 - RNA, 20 nt, synthetic construct
  source 1..20: mol_type = other RNA
ggggggctccggggcgctcc

SEQ ID NO: 4102 - RNA, 20 nt, synthetic construct
  source 1..20: mol_type = other RNA
cggggggctccggggcgctc

SEQ ID NO: 4103 - RNA, 20 nt, synthetic construct
  source 1..20: mol_type = other RNA
cgggacggcggggggctccg

SEQ ID NO: 4104 - RNA, 20 nt, synthetic construct
  source 1..20: mol_type = other RNA
gcgggacggcggggggctcc

SEQ ID NO: 4105 - RNA, 20 nt, synthetic construct
  source 1..20: mol_type = other RNA
ggcgggacggcggggggctc

SEQ ID NO: 4106 - RNA, 20 nt, synthetic construct
  source 1..20: mol_type = other RNA
gccccccgccgtcccgcccg

SEQ ID NO: 4107 - RNA, 20 nt, synthetic construct
  source 1..20: mol_type = other RNA
gccgcgggcgggacggcggg

SEQ ID NO: 4108 - RNA, 20 nt, synthetic construct
  source 1..20: mol_type = other RNA
cgccgcgggcgggacggcgg

SEQ ID NO: 4109 - RNA, 20 nt, synthetic construct
  source 1..20: mol_type = other RNA
acgccgcgggcgggacggcg

SEQ ID NO: 4110 - RNA, 20 nt, synthetic construct
  source 1..20: mol_type = other RNA
gacgccgcgggcgggacggc

SEQ ID NO: 4111 - RNA, 20 nt, synthetic construct
  source 1..20: mol_type = other RNA
ggacgccgcgggcgggacgg

SEQ ID NO: 4112 - RNA, 20 nt, synthetic construct
  source 1..20: mol_type = other RNA
gcgggacgccgcgggcggga

SEQ ID NO: 4113 - RNA, 20 nt, synthetic construct
  source 1..20: mol_type = other RNA
gggcgcgggacgccgcgggc

SEQ ID NO: 4114 - RNA, 20 nt, synthetic construct
  source 1..20: mol_type = other RNA
ggggcgcgggacgccgcggg

SEQ ID NO: 4115 - RNA, 20 nt, synthetic construct
  source 1..20: mol_type = other RNA
ggcggggcgcgggacgccgc

SEQ ID NO: 4116 - RNA, 20 nt, synthetic construct
  source 1..20: mol_type = other RNA
cggcggggcgcgggacgccg

SEQ ID NO: 4117 - RNA, 20 nt, synthetic construct
  source 1..20: mol_type = other RNA
gcgtcccgcgccccgccgcc

SEQ ID NO: 4118 - RNA, 20 nt, synthetic construct
  source 1..20: mol_type = other RNA
cgccccgccgccaggtgagc

SEQ ID NO: 4119 - RNA, 20 nt, synthetic construct
  source 1..20: mol_type = other RNA
ctcacctggcggcggggcgc

SEQ ID NO: 4120 - RNA, 20 nt, synthetic construct
  source 1..20: mol_type = other RNA
gccccgccgccaggtgagcc

SEQ ID NO: 4121 - RNA, 20 nt, synthetic construct
  source 1..20: mol_type = other RNA
gctcacctggcggcggggcg

SEQ ID NO: 4122 - RNA, 20 nt, synthetic construct
  source 1..20: mol_type = other RNA
gcccggctcacctggcggcg

SEQ ID NO: 4123 - RNA, 20 nt, synthetic construct
  source 1..20: mol_type = other RNA
ccgccaggtgagccgggccc

SEQ ID NO: 4124 - RNA, 20 nt, synthetic construct
  source 1..20: mol_type = other RNA
ggcccggctcacctggcggc

SEQ ID NO: 4125 - RNA, 20 nt, synthetic construct
  source 1..20: mol_type = other RNA
cgccaggtgagccgggccct

SEQ ID NO: 4126 - RNA, 20 nt, synthetic construct
  source 1..20: mol_type = other RNA
gggcccggctcacctggcgg

SEQ ID NO: 4127 - RNA, 20 nt, synthetic construct
  source 1..20: mol_type = other RNA
ccagggcccggctcacctgg

SEQ ID NO: 4128 - RNA, 20 nt, synthetic construct
  source 1..20: mol_type = other RNA
ggtgagccgggccctgggcg

SEQ ID NO: 4129 - RNA, 20 nt, synthetic construct
  source 1..20: mol_type = other RNA
cgcccagggcccggctcacc

SEQ ID NO: 4130 - RNA, 20 nt, synthetic construct
  source 1..20: mol_type = other RNA
gagccgggccctgggcgagg

SEQ ID NO: 4131 - RNA, 20 nt, synthetic construct
  source 1..20: mol_type = other RNA
ccgggccctgggcgaggagg

SEQ ID NO: 4132 - RNA, 20 nt, synthetic construct
  source 1..20: mol_type = other RNA
cgggccctgggcgaggaggc

SEQ ID NO: 4133 - RNA, 20 nt, synthetic construct
  source 1..20: mol_type = other RNA
gccctgggcgaggaggcggg

SEQ ID NO: 4134 - RNA, 20 nt, synthetic construct
  source 1..20: mol_type = other RNA
ccgcctcctcgcccagggcc

SEQ ID NO: 4135 - RNA, 20 nt, synthetic construct
  source 1..20: mol_type = other RNA
ccctgggcgaggaggcggga

SEQ ID NO: 4136 - RNA, 20 nt, synthetic construct
  source 1..20: mol_type = other RNA
tgggcgaggaggcgggaggg

SEQ ID NO: 4137 - RNA, 20 nt, synthetic construct
  source 1..20: mol_type = other RNA
ccctcccgcctcctcgccca

SEQ ID NO: 4138 - RNA, 20 nt, synthetic construct
  source 1..20: mol_type = other RNA
tccctcccgcctcctcgccc

SEQ ID NO: 4139 - RNA, 20 nt, synthetic construct
  source 1..20: mol_type = other RNA
gcgaggaggcgggagggagg

SEQ ID NO: 4140 - RNA, 20 nt, synthetic construct
  source 1..20: mol_type = other RNA
cgaggaggcgggagggagga

SEQ ID NO: 4141 - RNA, 20 nt, synthetic construct
  source 1..20: mol_type = other RNA
ggaggcgggagggaggaggg

SEQ ID NO: 4142 - RNA, 20 nt, synthetic construct
  source 1..20: mol_type = other RNA
gaggcgggagggaggaggga

SEQ ID NO: 4143 - RNA, 20 nt, synthetic construct
  source 1..20: mol_type = other RNA
aggcgggagggaggagggag

SEQ ID NO: 4144 - RNA, 20 nt, synthetic construct
  source 1..20: mol_type = other RNA
gggaggagggaggggagtcc

SEQ ID NO: 4145 - RNA, 20 nt, synthetic construct
  source 1..20: mol_type = other RNA
ggaggagggaggggagtcca

SEQ ID NO: 4146 - RNA, 20 nt, synthetic construct
  source 1..20: mol_type = other RNA
gaggggagtccagggcagcc

SEQ ID NO: 4147 - RNA, 20 nt, synthetic construct
  source 1..20: mol_type = other RNA
agtccagggcagccaggagt

SEQ ID NO: 4148 - RNA, 20 nt, synthetic construct
  source 1..20: mol_type = other RNA
gtccagggcagccaggagtc

SEQ ID NO: 4149 - RNA, 20 nt, synthetic construct
  source 1..20: mol_type = other RNA
cgcccgactcctggctgccc

SEQ ID NO: 4150 - RNA, 20 nt, synthetic construct
  source 1..20: mol_type = other RNA
gccaggagtcgggcgagcct

SEQ ID NO: 4151 - RNA, 20 nt, synthetic construct
  source 1..20: mol_type = other RNA
ccaggagtcgggcgagcctc

SEQ ID NO: 4152 - RNA, 20 nt, synthetic construct
  source 1..20: mol_type = other RNA
caggagtcgggcgagcctcg

SEQ ID NO: 4153 - RNA, 20 nt, synthetic construct
  source 1..20: mol_type = other RNA
aggagtcgggcgagcctcgg

SEQ ID NO: 4154 - RNA, 20 nt, synthetic construct
  source 1..20: mol_type = other RNA
cccgaggctcgcccgactcc

SEQ ID NO: 4155 - RNA, 20 nt, synthetic construct
  source 1..20: mol_type = other RNA
gagcctcgggggctgcagaa

SEQ ID NO: 4156 - RNA, 20 nt, synthetic construct
  source 1..20: mol_type = other RNA
agcctcgggggctgcagaat

SEQ ID NO: 4157 - RNA, 20 nt, synthetic construct
  source 1..20: mol_type = other RNA
gcctcgggggctgcagaatg

SEQ ID NO: 4158 - RNA, 20 nt, synthetic construct
  source 1..20: mol_type = other RNA
accccattctgcagcccccg

SEQ ID NO: 4159 - RNA, 20 nt, synthetic construct
  source 1..20: mol_type = other RNA
ggggctgcagaatggggtcg

SEQ ID NO: 4160 - RNA, 20 nt, synthetic construct
  source 1..20: mol_type = other RNA
gcgatgcccctgaccctcgc

SEQ ID NO: 4161 - RNA, 20 nt, synthetic construct
  source 1..20: mol_type = other RNA
ggcgagggtcaggggcatcg

SEQ ID NO: 4162 - RNA, 20 nt, synthetic construct
  source 1..20: mol_type = other RNA
gtggggccggcgagggtcag

SEQ ID NO: 4163 - RNA, 20 nt, synthetic construct
  source 1..20: mol_type = other RNA
gaccctcgccggccccaccc

SEQ ID NO: 4164 - RNA, 20 nt, synthetic construct
  source 1..20: mol_type = other RNA
ggtggggccggcgagggtca

SEQ ID NO: 4165 - RNA, 20 nt, synthetic construct
  source 1..20: mol_type = other RNA
gggtggggccggcgagggtc

SEQ ID NO: 4166 - RNA, 20 nt, synthetic construct
  source 1..20: mol_type = other RNA
ggcctgggtggggccggcga

SEQ ID NO: 4167 - RNA, 20 nt, synthetic construct
  source 1..20: mol_type = other RNA
cggcctgggtggggccggcg

SEQ ID NO: 4168 - RNA, 20 nt, synthetic construct
  source 1..20: mol_type = other RNA
gggggcggcctgggtggggc

SEQ ID NO: 4169 - RNA, 20 nt, synthetic construct
  source 1..20: mol_type = other RNA
cgcggggggcggcctgggtg

SEQ ID NO: 4170 - RNA, 20 nt, synthetic construct
  source 1..20: mol_type = other RNA
cccaggccgccccccgcgcg

SEQ ID NO: 4171 - RNA, 20 nt, synthetic construct
  source 1..20: mol_type = other RNA
gcgcggggggcggcctgggt

SEQ ID NO: 4172 - RNA, 20 nt, synthetic construct
  source 1..20: mol_type = other RNA
ccaggccgccccccgcgcgc

SEQ ID NO: 4173 - RNA, 20 nt, synthetic construct
  source 1..20: mol_type = other RNA
cgcgcggggggcggcctggg

SEQ ID NO: 4174 - RNA, 20 nt, synthetic construct
  source 1..20: mol_type = other RNA
caggccgccccccgcgcgcg

SEQ ID NO: 4175 - RNA, 20 nt, synthetic construct
  source 1..20: mol_type = other RNA
ccgcgcgcggggggcggcct

SEQ ID NO: 4176 - RNA, 20 nt, synthetic construct
  source 1..20: mol_type = other RNA
cccgcgcgcggggggcggcc

SEQ ID NO: 4177 - RNA, 20 nt, synthetic construct
  source 1..20: mol_type = other RNA
ggagccccgcgcgcgggggg

SEQ ID NO: 4178 - RNA, 20 nt, synthetic construct
  source 1..20: mol_type = other RNA
gcgggagccccgcgcgcggg

SEQ ID NO: 4179 - RNA, 20 nt, synthetic construct
  source 1..20: mol_type = other RNA
tgcgggagccccgcgcgcgg

SEQ ID NO: 4180 - RNA, 20 nt, synthetic construct
  source 1..20: mol_type = other RNA
ctgcgggagccccgcgcgcg

SEQ ID NO: 4181 - RNA, 20 nt, synthetic construct
  source 1..20: mol_type = other RNA
gctgcgggagccccgcgcgc

SEQ ID NO: 4182 - RNA, 20 nt, synthetic construct
  source 1..20: mol_type = other RNA
tgctgcgggagccccgcgcg

SEQ ID NO: 4183 - RNA, 20 nt, synthetic construct
  source 1..20: mol_type = other RNA
cccgcagcacagcctttctc

SEQ ID NO: 4184 - RNA, 20 nt, synthetic construct
  source 1..20: mol_type = other RNA
ccggagaaaggctgtgctgc

SEQ ID NO: 4185 - RNA, 20 nt, synthetic construct
  source 1..20: mol_type = other RNA
gccggagaaaggctgtgctg

SEQ ID NO: 4186 - RNA, 20 nt, synthetic construct
  source 1..20: mol_type = other RNA
tttgggctagggccggagaa

SEQ ID NO: 4187 - RNA, 20 nt, synthetic construct
  source 1..20: mol_type = other RNA
tgggcgatttgggctagggc

SEQ ID NO: 4188 - RNA, 20 nt, synthetic construct
  source 1..20: mol_type = other RNA
tagcccaaatcgcccagacc

SEQ ID NO: 4189 - RNA, 20 nt, synthetic construct
  source 1..20: mol_type = other RNA
ggtctgggcgatttgggcta

SEQ ID NO: 4190 - RNA, 20 nt, synthetic construct
  source 1..20: mol_type = other RNA
tggtctgggcgatttgggct

SEQ ID NO: 4191 - RNA, 20 nt, synthetic construct
  source 1..20: mol_type = other RNA
caaatcgcccagaccaggcg

SEQ ID NO: 4192 - RNA, 20 nt, synthetic construct
  source 1..20: mol_type = other RNA
gcgcctggtctgggcgattt

SEQ ID NO: 4193 - RNA, 20 nt, synthetic construct
  source 1..20: mol_type = other RNA
cgcgcctggtctgggcgatt

SEQ ID NO: 4194 - RNA, 20 nt, synthetic construct
  source 1..20: mol_type = other RNA
ctgggatccgcgcctggtct

SEQ ID NO: 4195 - RNA, 20 nt, synthetic construct
  source 1..20: mol_type = other RNA
accaggcgcggatcccagcc

SEQ ID NO: 4196 - RNA, 20 nt, synthetic construct
  source 1..20: mol_type = other RNA
gctgggatccgcgcctggtc

SEQ ID NO: 4197 - RNA, 20 nt, synthetic construct
  source 1..20: mol_type = other RNA
gccaggctgggatccgcgcc

SEQ ID NO: 4198 - RNA, 20 nt, synthetic construct
  source 1..20: mol_type = other RNA
cggatcccagcctggccagc

SEQ ID NO: 4199 - RNA, 20 nt, synthetic construct
  source 1..20: mol_type = other RNA
atcccagcctggccagcagg

SEQ ID NO: 4200 - RNA, 20 nt, synthetic construct
  source 1..20: mol_type = other RNA
ccagcctggccagcaggcgg

SEQ ID NO: 4201 - RNA, 20 nt, synthetic construct
  source 1..20: mol_type = other RNA
cagcctggccagcaggcggc

SEQ ID NO: 4202 - RNA, 20 nt, synthetic construct
  source 1..20: mol_type = other RNA
cgccgcctgctggccaggct

SEQ ID NO: 4203 - RNA, 20 nt, synthetic construct
  source 1..20: mol_type = other RNA
ccgccgcctgctggccaggc

SEQ ID NO: 4204 - RNA, 20 nt, synthetic construct
  source 1..20: mol_type = other RNA
tggccagcaggcggcgggcg

SEQ ID NO: 4205 - RNA, 20 nt, synthetic construct
  source 1..20: mol_type = other RNA
ggccagcaggcggcgggcgc

SEQ ID NO: 4206 - RNA, 20 nt, synthetic construct
  source 1..20: mol_type = other RNA
gccagcaggcggcgggcgcg

SEQ ID NO: 4207 - RNA, 20 nt, synthetic construct
  source 1..20: mol_type = other RNA
gcgcccgccgcctgctggcc

SEQ ID NO: 4208 - RNA, 20 nt, synthetic construct
  source 1..20: mol_type = other RNA
agcaggcggcgggcgcgggg

SEQ ID NO: 4209 - RNA, 20 nt, synthetic construct
  source 1..20: mol_type = other RNA
gccccgcgcccgccgcctgc

SEQ ID NO: 4210 - RNA, 20 nt, synthetic construct
  source 1..20: mol_type = other RNA
gcgggcgcggggcggcgagc

SEQ ID NO: 4211 - RNA, 20 nt, synthetic construct
  source 1..20: mol_type = other RNA
cgggcgcggggcggcgagcc

SEQ ID NO: 4212 - RNA, 20 nt, synthetic construct
  source 1..20: mol_type = other RNA
gggcgcggggcggcgagccg

SEQ ID NO: 4213 - RNA, 20 nt, synthetic construct
  source 1..20: mol_type = other RNA
gcggggcggcgagccggggc

SEQ ID NO: 4214 - RNA, 20 nt, synthetic construct
  source 1..20: mol_type = other RNA
ggcggcgagccggggccgga

SEQ ID NO: 4215 - RNA, 20 nt, synthetic construct
  source 1..20: mol_type = other RNA
gcgagccggggccggacggc

SEQ ID NO: 4216 - RNA, 20 nt, synthetic construct
  source 1..20: mol_type = other RNA
tggctccagccgtccggccc

SEQ ID NO: 4217 - RNA, 20 nt, synthetic construct
  source 1..20: mol_type = other RNA
cggacggctggagccagaac

SEQ ID NO: 4218 - RNA, 20 nt, synthetic construct
  source 1..20: mol_type = other RNA
cggttctggctccagccgtc

SEQ ID NO: 4219 - RNA, 20 nt, synthetic construct
  source 1..20: mol_type = other RNA
gcgtggagagcagccggttc

SEQ ID NO: 4220 - RNA, 20 nt, synthetic construct
  source 1..20: mol_type = other RNA
aggggggcgtggagagcagc

SEQ ID NO: 4221 - RNA, 20 nt, synthetic construct
  source 1..20: mol_type = other RNA
tgctctccacgcccccctct

SEQ ID NO: 4222 - RNA, 20 nt, synthetic construct
  source 1..20: mol_type = other RNA
gcccccctctcggtgctgcc

SEQ ID NO: 4223 - RNA, 20 nt, synthetic construct
  source 1..20: mol_type = other RNA
gcagcaccgagaggggggcg

SEQ ID NO: 4224 - RNA, 20 nt, synthetic construct
  source 1..20: mol_type = other RNA
cccctctcggtgctgcccgg

SEQ ID NO: 4225 - RNA, 20 nt, synthetic construct
  source 1..20: mol_type = other RNA
tccgggcagcaccgagaggg

SEQ ID NO: 4226 - RNA, 20 nt, synthetic construct
  source 1..20: mol_type = other RNA
ctccgggcagcaccgagagg

SEQ ID NO: 4227 - RNA, 20 nt, synthetic construct
  source 1..20: mol_type = other RNA
tctcggtgctgcccggaggc

SEQ ID NO: 4228 - RNA, 20 nt, synthetic construct
  source 1..20: mol_type = other RNA
cctccgggcagcaccgagag

SEQ ID NO: 4229 - RNA, 20 nt, synthetic construct
  source 1..20: mol_type = other RNA
gcctccgggcagcaccgaga

SEQ ID NO: 4230 - RNA, 20 nt, synthetic construct
  source 1..20: mol_type = other RNA
ggcctccgggcagcaccgag

SEQ ID NO: 4231 - RNA, 20 nt, synthetic construct
  source 1..20: mol_type = other RNA
ggaggcggagtccggcctcc

SEQ ID NO: 4232 - RNA, 20 nt, synthetic construct
  source 1..20: mol_type = other RNA
tggaggcggagtccggcctc

SEQ ID NO: 4233 - RNA, 20 nt, synthetic construct
  source 1..20: mol_type = other RNA
ggctcggtggaggcggagtc

SEQ ID NO: 4234 - RNA, 20 nt, synthetic construct
  source 1..20: mol_type = other RNA
gggtgggggctcggtggagg

SEQ ID NO: 4235 - RNA, 20 nt, synthetic construct
  source 1..20: mol_type = other RNA
tccaccgagcccccacccgc

SEQ ID NO: 4236 - RNA, 20 nt, synthetic construct
  source 1..20: mol_type = other RNA
ccaccgagcccccacccgcc

SEQ ID NO: 4237 - RNA, 20 nt, synthetic construct
  source 1..20: mol_type = other RNA
ggcgggtgggggctcggtgg

SEQ ID NO: 4238 - RNA, 20 nt, synthetic construct
  source 1..20: mol_type = other RNA
cccggcgggtgggggctcgg

SEQ ID NO: 4239 - RNA, 20 nt, synthetic construct
  source 1..20: mol_type = other RNA
cttcccggcgggtgggggct

SEQ ID NO: 4240 - RNA, 20 nt, synthetic construct
  source 1..20: mol_type = other RNA
gagctcttcccggcgggtgg

SEQ ID NO: 4241 - RNA, 20 nt, synthetic construct
  source 1..20: mol_type = other RNA
acccgccgggaagagctccg

SEQ ID NO: 4242 - RNA, 20 nt, synthetic construct
  source 1..20: mol_type = other RNA
ggagctcttcccggcgggtg

SEQ ID NO: 4243 - RNA, 20 nt, synthetic construct
  source 1..20: mol_type = other RNA
cggagctcttcccggcgggt

SEQ ID NO: 4244 - RNA, 20 nt, synthetic construct
  source 1..20: mol_type = other RNA
gcggagctcttcccggcggg

SEQ ID NO: 4245 - RNA, 20 nt, synthetic construct
  source 1..20: mol_type = other RNA
tccgcggagctcttcccggc

SEQ ID NO: 4246 - RNA, 20 nt, synthetic construct
  source 1..20: mol_type = other RNA
ctccgcggagctcttcccgg

SEQ ID NO: 4247 - RNA, 20 nt, synthetic construct
  source 1..20: mol_type = other RNA
gtactccgcggagctcttcc

SEQ ID NO: 4248 - RNA, 20 nt, synthetic construct
  source 1..20: mol_type = other RNA
aaaatgggctctgtactccg

SEQ ID NO: 4249 - RNA, 20 nt, synthetic construct
  source 1..20: mol_type = other RNA
ttttctagctgtgtccactg

SEQ ID NO: 4250 - RNA, 20 nt, synthetic construct
  source 1..20: mol_type = other RNA
agtggacacagctagaaaat

SEQ ID NO: 4251 - RNA, 20 nt, synthetic construct
  source 1..20: mol_type = other RNA
cagtggacacagctagaaaa

SEQ ID NO: 4252 - RNA, 20 nt, synthetic construct
  source 1..20: mol_type = other RNA
ctgtgtccactgaggctgaa

SEQ ID NO: 4253 - RNA, 20 nt, synthetic construct
  source 1..20: mol_type = other RNA
tgaggctgaacggatccgcg

SEQ ID NO: 4254 - RNA, 20 nt, synthetic construct
  source 1..20: mol_type = other RNA
gcggatccgttcagcctcag

SEQ ID NO: 4255 - RNA, 20 nt, synthetic construct
  source 1..20: mol_type = other RNA
tgaacggatccgcgcggact

SEQ ID NO: 4256 - RNA, 20 nt, synthetic construct
  source 1..20: mol_type = other RNA
cacggagcaccaagtccgcg

SEQ ID NO: 4257 - RNA, 20 nt, synthetic construct
  source 1..20: mol_type = other RNA
gtgctccgtgctcgccccct

SEQ ID NO: 4258 - RNA, 20 nt, synthetic construct
  source 1..20: mol_type = other RNA
tgctccgtgctcgcccccta

SEQ ID NO: 4259 - RNA, 20 nt, synthetic construct
  source 1..20: mol_type = other RNA
ccgtgctcgccccctagggc

SEQ ID NO: 4260 - RNA, 20 nt, synthetic construct
  source 1..20: mol_type = other RNA
cgtgctcgccccctagggcc

SEQ ID NO: 4261 - RNA, 20 nt, synthetic construct
  source 1..20: mol_type = other RNA
ccggccctagggggcgagca

SEQ ID NO: 4262 - RNA, 20 nt, synthetic construct
  source 1..20: mol_type = other RNA
ccccctagggccgggtccgc

SEQ ID NO: 4263 - RNA, 20 nt, synthetic construct
  source 1..20: mol_type = other RNA
cccctagggccgggtccgcc

SEQ ID NO: 4264 - RNA, 20 nt, synthetic construct
  source 1..20: mol_type = other RNA
ccggcggacccggccctagg

SEQ ID NO: 4265 - RNA, 20 nt, synthetic construct
  source 1..20: mol_type = other RNA
cccggcggacccggccctag

SEQ ID NO: 4266 - RNA, 20 nt, synthetic construct
  source 1..20: mol_type = other RNA
tcccggcggacccggcccta

SEQ ID NO: 4267 - RNA, 20 nt, synthetic construct
  source 1..20: mol_type = other RNA
ctcccggcggacccggccct

SEQ ID NO: 4268 - RNA, 20 nt, synthetic construct
  source 1..20: mol_type = other RNA
ggcggcgctcccggcggacc

SEQ ID NO: 4269 - RNA, 20 nt, synthetic construct
  source 1..20: mol_type = other RNA
ccgccgggagcgccgccctc

SEQ ID NO: 4270 - RNA, 20 nt, synthetic construct
  source 1..20: mol_type = other RNA
ccggagggcggcgctcccgg

SEQ ID NO: 4271 - RNA, 20 nt, synthetic construct
  source 1..20: mol_type = other RNA
actccggagggcggcgctcc

SEQ ID NO: 4272 - RNA, 20 nt, synthetic construct
  source 1..20: mol_type = other RNA
cgccgccctccggagttgtc

SEQ ID NO: 4273 - RNA, 20 nt, synthetic construct
  source 1..20: mol_type = other RNA
gccctccggagttgtccggc

SEQ ID NO: 4274 - RNA, 20 nt, synthetic construct
  source 1..20: mol_type = other RNA
ggccggacaactccggaggg

SEQ ID NO: 4275 - RNA, 20 nt, synthetic construct
  source 1..20: mol_type = other RNA
gccggccggacaactccgga

SEQ ID NO: 4276 - RNA, 20 nt, synthetic construct
  source 1..20: mol_type = other RNA
cgccggccggacaactccgg

SEQ ID NO: 4277 - RNA, 20 nt, synthetic construct
  source 1..20: mol_type = other RNA
gtgcgccggccggacaactc

SEQ ID NO: 4278 - RNA, 20 nt, synthetic construct
  source 1..20: mol_type = other RNA
ccggccggcgcacacctgcc

SEQ ID NO: 4279 - RNA, 20 nt, synthetic construct
  source 1..20: mol_type = other RNA
ccgggcaggtgtgcgccggc

SEQ ID NO: 4280 - RNA, 20 nt, synthetic construct
  source 1..20: mol_type = other RNA
ggggccgggcaggtgtgcgc

SEQ ID NO: 4281 - RNA, 20 nt, synthetic construct
  source 1..20: mol_type = other RNA
ggggcgctgcggggccgggc

SEQ ID NO: 4282 - RNA, 20 nt, synthetic construct
  source 1..20: mol_type = other RNA
agctggggcgctgcggggcc

SEQ ID NO: 4283 - RNA, 20 nt, synthetic construct
  source 1..20: mol_type = other RNA
gagctggggcgctgcggggc

SEQ ID NO: 4284 - RNA, 20 nt, synthetic construct
  source 1..20: mol_type = other RNA
aggtgagctggggcgctgcg

SEQ ID NO: 4285 - RNA, 20 nt, synthetic construct
  source 1..20: mol_type = other RNA
gaggtgagctggggcgctgc

SEQ ID NO: 4286 - RNA, 20 nt, synthetic construct
  source 1..20: mol_type = other RNA
agaggtgagctggggcgctg

SEQ ID NO: 4287 - RNA, 20 nt, synthetic construct
  source 1..20: mol_type = other RNA
agagacaaagaggtgagctg

SEQ ID NO: 4288 - RNA, 20 nt, synthetic construct
  source 1..20: mol_type = other RNA
gagagacaaagaggtgagct

SEQ ID NO: 4289 - RNA, 20 nt, synthetic construct
  source 1..20: mol_type = other RNA
ggagagacaaagaggtgagc

SEQ ID NO: 4290 - RNA, 20 nt, synthetic construct
  source 1..20: mol_type = other RNA
gcgctgcgggagagacaaag

SEQ ID NO: 4291 - RNA, 20 nt, synthetic construct
  source 1..20: mol_type = other RNA
tctctcccgcagcgcacccc

SEQ ID NO: 4292 - RNA, 20 nt, synthetic construct
  source 1..20: mol_type = other RNA
cagcgcacccccggacgcta

SEQ ID NO: 4293 - RNA, 20 nt, synthetic construct
  source 1..20: mol_type = other RNA
agcgtccgggggtgcgctgc

SEQ ID NO: 4294 - RNA, 20 nt, synthetic construct
  source 1..20: mol_type = other RNA
tagcgtccgggggtgcgctg

SEQ ID NO: 4295 - RNA, 20 nt, synthetic construct
  source 1..20: mol_type = other RNA
gggtgggccatagcgtccgg

SEQ ID NO: 4296 - RNA, 20 nt, synthetic construct
  source 1..20: mol_type = other RNA
ggggtgggccatagcgtccg

SEQ ID NO: 4297 - RNA, 20 nt, synthetic construct
  source 1..20: mol_type = other RNA
gacgctatggcccacccctc

SEQ ID NO: 4298 - RNA, 20 nt, synthetic construct
  source 1..20: mol_type = other RNA
aggggtgggccatagcgtcc

SEQ ID NO: 4299 - RNA, 20 nt, synthetic construct
  source 1..20: mol_type = other RNA
gaggggtgggccatagcgtc

SEQ ID NO: 4300 - RNA, 20 nt, synthetic construct
  source 1..20: mol_type = other RNA
ctatggcccacccctccggc

SEQ ID NO: 4301 - RNA, 20 nt, synthetic construct
  source 1..20: mol_type = other RNA
aaggggccagccggaggggt

SEQ ID NO: 4302 - RNA, 20 nt, synthetic construct
  source 1..20: mol_type = other RNA
gaaggggccagccggagggg

SEQ ID NO: 4303 - RNA, 20 nt, synthetic construct
  source 1..20: mol_type = other RNA
ctccggctggccccttctgt

SEQ ID NO: 4304 - RNA, 20 nt, synthetic construct
  source 1..20: mol_type = other RNA
acagaaggggccagccggag

SEQ ID NO: 4305 - RNA, 20 nt, synthetic construct
  source 1..20: mol_type = other RNA
tacagaaggggccagccgga

SEQ ID NO: 4306 - RNA, 20 nt, synthetic construct
  source 1..20: mol_type = other RNA
ctacagaaggggccagccgg

SEQ ID NO: 4307 - RNA, 20 nt, synthetic construct
  source 1..20: mol_type = other RNA
ggctggccccttctgtagga

SEQ ID NO: 4308 - RNA, 20 nt, synthetic construct
  source 1..20: mol_type = other RNA
gccgtgcacgcagcattaac

SEQ ID NO: 4309 - RNA, 20 nt, synthetic construct
  source 1..20: mol_type = other RNA
ccgtgcacgcagcattaact

SEQ ID NO: 4310 - RNA, 20 nt, synthetic construct
  source 1..20: mol_type = other RNA
gttaatgctgcgtgcacggc

SEQ ID NO: 4311 - RNA, 20 nt, synthetic construct
  source 1..20: mol_type = other RNA
agttaatgctgcgtgcacgg

SEQ ID NO: 4312 - RNA, 20 nt, synthetic construct
  source 1..20: mol_type = other RNA
cccagttaatgctgcgtgca

SEQ ID NO: 4313 - RNA, 20 nt, synthetic construct
  source 1..20: mol_type = other RNA
caagtaataacaaaataaca

SEQ ID NO: 4314 - RNA, 20 nt, synthetic construct
  source 1..20: mol_type = other RNA
ttattttgttattacttgcc

SEQ ID NO: 4315 - RNA, 20 nt, synthetic construct
  source 1..20: mol_type = other RNA
attacttgcctggaaccatg

SEQ ID NO: 4316 - RNA, 20 nt, synthetic construct
  source 1..20: mol_type = other RNA
ttacttgcctggaaccatgt

SEQ ID NO: 4317 - RNA, 20 nt, synthetic construct
  source 1..20: mol_type = other RNA
gagggtacccacatggttcc

SEQ ID NO: 4318 - RNA, 20 nt, synthetic construct
  source 1..20: mol_type = other RNA
aaccatgtgggtaccctccc

SEQ ID NO: 4319 - RNA, 20 nt, synthetic construct
  source 1..20: mol_type = other RNA
tgtgggtaccctccccggcc

SEQ ID NO: 4320 - RNA, 20 nt, synthetic construct
  source 1..20: mol_type = other RNA
gtgggtaccctccccggcct

SEQ ID NO: 4321 - RNA, 20 nt, synthetic construct
  source 1..20: mol_type = other RNA
ggccggggagggtacccaca

SEQ ID NO: 4322 - RNA, 20 nt, synthetic construct
  source 1..20: mol_type = other RNA
gtaccctccccggcctgggt

SEQ ID NO: 4323 - RNA, 20 nt, synthetic construct
  source 1..20: mol_type = other RNA
ccctccccggcctgggttgg

SEQ ID NO: 4324 - RNA, 20 nt, synthetic construct
  source 1..20: mol_type = other RNA
cctccccggcctgggttgga

SEQ ID NO: 4325 - RNA, 20 nt, synthetic construct
  source 1..20: mol_type = other RNA
cctccaacccaggccgggga

SEQ ID NO: 4326 - RNA, 20 nt, synthetic construct
  source 1..20: mol_type = other RNA
ccctccaacccaggccgggg

SEQ ID NO: 4327 - RNA, 20 nt, synthetic construct
  source 1..20: mol_type = other RNA
ccggcctgggttggagggag

SEQ ID NO: 4328 - RNA, 20 nt, synthetic construct
  source 1..20: mol_type = other RNA
gctccctccaacccaggccg

SEQ ID NO: 4329 - RNA, 20 nt, synthetic construct
  source 1..20: mol_type = other RNA
cgctccctccaacccaggcc

SEQ ID NO: 4330 - RNA, 20 nt, synthetic construct
  source 1..20: mol_type = other RNA
cctgggttggagggagcgga

SEQ ID NO: 4331 - RNA, 20 nt, synthetic construct
  source 1..20: mol_type = other RNA
ccgctccctccaacccaggc

SEQ ID NO: 4332 - RNA, 20 nt, synthetic construct
  source 1..20: mol_type = other RNA
ctgggttggagggagcggat

SEQ ID NO: 4333 - RNA, 20 nt, synthetic construct
  source 1..20: mol_type = other RNA
ccatccgctccctccaaccc

SEQ ID NO: 4334 - RNA, 20 nt, synthetic construct
  source 1..20: mol_type = other RNA
tggagggagcggatgggtgt

SEQ ID NO: 4335 - RNA, 20 nt, synthetic construct
  source 1..20: mol_type = other RNA
ggagggagcggatgggtgta

SEQ ID NO: 4336 - RNA, 20 nt, synthetic construct
  source 1..20: mol_type = other RNA
gagggagcggatgggtgtag

SEQ ID NO: 4337 - RNA, 20 nt, synthetic construct
  source 1..20: mol_type = other RNA
agcggatgggtgtaggggcg

SEQ ID NO: 4338 - RNA, 20 nt, synthetic construct
  source 1..20: mol_type = other RNA
ggcgaggcgcctcccgccct

SEQ ID NO: 4339 - RNA, 20 nt, synthetic construct
  source 1..20: mol_type = other RNA
aggcgcctcccgccctcggc

SEQ ID NO: 4340 - RNA, 20 nt, synthetic construct
  source 1..20: mol_type = other RNA
cccgccctcggctggagacg

SEQ ID NO: 4341 - RNA, 20 nt, synthetic construct
  source 1..20: mol_type = other RNA
cgtctccagccgagggcggg

SEQ ID NO: 4342 - RNA, 20 nt, synthetic construct
  source 1..20: mol_type = other RNA
cctcgtctccagccgagggc

SEQ ID NO: 4343 - RNA, 20 nt, synthetic construct
  source 1..20: mol_type = other RNA
gcctcgtctccagccgaggg

SEQ ID NO: 4344 - RNA, 20 nt, synthetic construct
  source 1..20: mol_type = other RNA
gcggcctcgtctccagccga

SEQ ID NO: 4345 - RNA, 20 nt, synthetic construct
  source 1..20: mol_type = other RNA
tgcggcctcgtctccagccg

SEQ ID NO: 4346 - RNA, 20 nt, synthetic construct
  source 1..20: mol_type = other RNA
agaccccttctcacctcttg

SEQ ID NO: 4347 - RNA, 20 nt, synthetic construct
  source 1..20: mol_type = other RNA
aagaggtgagaaggggtctg

SEQ ID NO: 4348 - RNA, 20 nt, synthetic construct
  source 1..20: mol_type = other RNA
gaccccttctcacctcttga

SEQ ID NO: 4349 - RNA, 20 nt, synthetic construct
  source 1..20: mol_type = other RNA
accccttctcacctcttgag

SEQ ID NO: 4350 - RNA, 20 nt, synthetic construct
  source 1..20: mol_type = other RNA
ccccttctcacctcttgagg

SEQ ID NO: 4351 - RNA, 20 nt, synthetic construct
  source 1..20: mol_type = other RNA
ccccctcaagaggtgagaag

SEQ ID NO: 4352 - RNA, 20 nt, synthetic construct
  source 1..20: mol_type = other RNA
accccctcaagaggtgagaa

SEQ ID NO: 4353 - RNA, 20 nt, synthetic construct
  source 1..20: mol_type = other RNA
gaccccctcaagaggtgaga

SEQ ID NO: 4354 - RNA, 20 nt, synthetic construct
  source 1..20: mol_type = other RNA
agggggaggaccccctcaag

SEQ ID NO: 4355 - RNA, 20 nt, synthetic construct
  source 1..20: mol_type = other RNA
tgagggggtcctccccctcc

SEQ ID NO: 4356 - RNA, 20 nt, synthetic construct
  source 1..20: mol_type = other RNA
ccccctcctggtgctccctc

SEQ ID NO: 4357 - RNA, 20 nt, synthetic construct
  source 1..20: mol_type = other RNA
cccctcctggtgctccctct

SEQ ID NO: 4358 - RNA, 20 nt, synthetic construct
  source 1..20: mol_type = other RNA
gagggagcaccaggaggggg

SEQ ID NO: 4359 - RNA, 20 nt, synthetic construct
  source 1..20: mol_type = other RNA
ccagagggagcaccaggagg

SEQ ID NO: 4360 - RNA, 20 nt, synthetic construct
  source 1..20: mol_type = other RNA
cccagagggagcaccaggag

SEQ ID NO: 4361 - RNA, 20 nt, synthetic construct
  source 1..20: mol_type = other RNA
acccagagggagcaccagga

SEQ ID NO: 4362 - RNA, 20 nt, synthetic construct
  source 1..20: mol_type = other RNA
gacccagagggagcaccagg

SEQ ID NO: 4363 - RNA, 20 nt, synthetic construct
  source 1..20: mol_type = other RNA
gtgctccctctgggtccccc

SEQ ID NO: 4364 - RNA, 20 nt, synthetic construct
  source 1..20: mol_type = other RNA
ggggacccagagggagcacc

SEQ ID NO: 4365 - RNA, 20 nt, synthetic construct
  source 1..20: mol_type = other RNA
aacaaccagggggacccaga

SEQ ID NO: 4366 - RNA, 20 nt, synthetic construct
  source 1..20: mol_type = other RNA
caacaaccagggggacccag

SEQ ID NO: 4367 - RNA, 20 nt, synthetic construct
  source 1..20: mol_type = other RNA
aagctgctacaacaaccagg

SEQ ID NO: 4368 - RNA, 20 nt, synthetic construct
  source 1..20: mol_type = other RNA
taagctgctacaacaaccag

SEQ ID NO: 4369 - RNA, 20 nt, synthetic construct
  source 1..20: mol_type = other RNA
ttaagctgctacaacaacca

SEQ ID NO: 4370 - RNA, 20 nt, synthetic construct
  source 1..20: mol_type = other RNA
gttaagctgctacaacaacc

SEQ ID NO: 4371 - RNA, 20 nt, synthetic construct
  source 1..20: mol_type = other RNA
tgtagcagcttaactgtatc

SEQ ID NO: 4372 - RNA, 20 nt, synthetic construct
  source 1..20: mol_type = other RNA
gcttaactgtatctggagcc

SEQ ID NO: 4373 - RNA, 20 nt, synthetic construct
  source 1..20: mol_type = other RNA
ggaggtgcgagttcaggtcc

SEQ ID NO: 4374 - RNA, 20 nt, synthetic construct
  source 1..20: mol_type = other RNA
gaggtaggaggtgcgagttc

SEQ ID NO: 4375 - RNA, 20 nt, synthetic construct
  source 1..20: mol_type = other RNA
tgtaaacatgaagaggtagg

SEQ ID NO: 4376 - RNA, 20 nt, synthetic construct
  source 1..20: mol_type = other RNA
atatgtaaacatgaagaggt

SEQ ID NO: 4377 - RNA, 20 nt, synthetic construct
  source 1..20: mol_type = other RNA
gggtatatgtaaacatgaag

SEQ ID NO: 4378 - RNA, 20 nt, synthetic construct
  source 1..20: mol_type = other RNA
ccagtatctttgcacaaacc

SEQ ID NO: 4379 - RNA, 20 nt, synthetic construct
  source 1..20: mol_type = other RNA
cagtatctttgcacaaacca

SEQ ID NO: 4380 - RNA, 20 nt, synthetic construct
  source 1..20: mol_type = other RNA
agtatctttgcacaaaccag

SEQ ID NO: 4381 - RNA, 20 nt, synthetic construct
  source 1..20: mol_type = other RNA
ctggtttgtgcaaagatact

SEQ ID NO: 4382 - RNA, 20 nt, synthetic construct
  source 1..20: mol_type = other RNA
cctggtttgtgcaaagatac

SEQ ID NO: 4383 - RNA, 20 nt, synthetic construct
  source 1..20: mol_type = other RNA
tctttgcacaaaccaggggt

SEQ ID NO: 4384 - RNA, 20 nt, synthetic construct
  source 1..20: mol_type = other RNA
ctttgcacaaaccaggggtt

SEQ ID NO: 4385 - RNA, 20 nt, synthetic construct
  source 1..20: mol_type = other RNA
tttgcacaaaccaggggttg

SEQ ID NO: 4386 - RNA, 20 nt, synthetic construct
  source 1..20: mol_type = other RNA
ttgcacaaaccaggggttgg

SEQ ID NO: 4387 - RNA, 20 nt, synthetic construct
  source 1..20: mol_type = other RNA
cacaaaccaggggttggggg

SEQ ID NO: 4388 - RNA, 20 nt, synthetic construct
  source 1..20: mol_type = other RNA
acaaaccaggggttggggga

SEQ ID NO: 4389 - RNA, 20 nt, synthetic construct
  source 1..20: mol_type = other RNA
aggggttgggggagggtctc

SEQ ID NO: 4390 - RNA, 20 nt, synthetic construct
  source 1..20: mol_type = other RNA
agagaccctcccccaacccc

SEQ ID NO: 4391 - RNA, 20 nt, synthetic construct
  source 1..20: mol_type = other RNA
gactttaaaaaatataaaat

SEQ ID NO: 4392 - RNA, 20 nt, synthetic construct
  source 1..20: mol_type = other RNA
atattttttaaagtcagttt

SEQ ID NO: 4393 - DNA, 28 bp, synthetic construct
  source 1..28: mol_type = other DNA
gcgcacgcacacacacgcacaacctagg

SEQ ID NO: 4394 - DNA, 28 bp, synthetic construct
  source 1..28: mol_type = other DNA
cacgcacacacacgcacaacctaggagg

SEQ ID NO: 4395 - DNA, 28 bp, synthetic construct
  source 1..28: mol_type = other DNA
gtggtggtcattggtgtagcctcctagg

SEQ ID NO: 4396 - DNA, 28 bp, synthetic construct
  source 1..28: mol_type = other DNA
ctacaccaatgaccaccaccagccctgg

SEQ ID NO: 4397 - DNA, 28 bp, synthetic construct
  source 1..28: mol_type = other DNA
tgtggccagggctggtggtggtcattgg

SEQ ID NO: 4398 - DNA, 28 bp, synthetic construct
  source 1..28: mol_type = other DNA
atctgcatgtggccagggctggtggtgg

SEQ ID NO: 4399 - DNA, 28 bp, synthetic construct
  source 1..28: mol_type = other DNA
tgaatctgcatgtggccagggctggtgg

SEQ ID NO: 4400 - DNA, 28 bp, synthetic construct
  source 1..28: mol_type = other DNA
accagccctggccacatgcagattcagg

SEQ ID NO: 4401 - DNA, 28 bp, synthetic construct
  source 1..28: mol_type = other DNA
ccctgaatctgcatgtggccagggctgg

SEQ ID NO: 4402 - DNA, 28 bp, synthetic construct
  source 1..28: mol_type = other DNA
ccagccctggccacatgcagattcaggg

SEQ ID NO: 4403 - DNA, 28 bp, synthetic construct
  source 1..28: mol_type = other DNA
agtgccctgaatctgcatgtggccaggg

SEQ ID NO: 4404 - DNA, 28 bp, synthetic construct
  source 1..28: mol_type = other DNA
cagtgccctgaatctgcatgtggccagg

SEQ ID NO: 4405 - DNA, 28 bp, synthetic construct
  source 1..28: mol_type = other DNA
gccacatgcagattcagggcactgatgg

SEQ ID NO: 4406 - DNA, 28 bp, synthetic construct
  source 1..28: mol_type = other DNA
cccatcagtgccctgaatctgcatgtgg

SEQ ID NO: 4407 - DNA, 28 bp, synthetic construct
  source 1..28: mol_type = other DNA
ccacatgcagattcagggcactgatggg

SEQ ID NO: 4408 - DNA, 28 bp, synthetic construct
  source 1..28: mol_type = other DNA
cacatgcagattcagggcactgatgggg

SEQ ID NO: 4409 - DNA, 28 bp, synthetic construct
  source 1..28: mol_type = other DNA
tcagggcactgatggggtgctaagctgg

SEQ ID NO: 4410 - DNA, 28 bp, synthetic construct
  source 1..28: mol_type = other DNA
cagggcactgatggggtgctaagctggg

SEQ ID NO: 4411 - DNA, 28 bp, synthetic construct
  source 1..28: mol_type = other DNA
atggggtgctaagctgggctgattctgg

SEQ ID NO: 4412 - DNA, 28 bp, synthetic construct
  source 1..28: mol_type = other DNA
tggggtgctaagctgggctgattctggg

SEQ ID NO: 4413 - DNA, 28 bp, synthetic construct
  source 1..28: mol_type = other DNA
tgattctgggccactccctgtgttcagg

SEQ ID NO: 4414 - DNA, 28 bp, synthetic construct
  source 1..28: mol_type = other DNA
ttctgggccactccctgtgttcaggagg

SEQ ID NO: 4415 - DNA, 28 bp, synthetic construct
  source 1..28: mol_type = other DNA
ttattaacctcctgaacacagggagtgg

SEQ ID NO: 4416 - DNA, 28 bp, synthetic construct
  source 1..28: mol_type = other DNA
actccctgtgttcaggaggttaataagg

SEQ ID NO: 4417 - DNA, 28 bp, synthetic construct
  source 1..28: mol_type = other DNA
ggtccttattaacctcctgaacacaggg

SEQ ID NO: 4418 - DNA, 28 bp, synthetic construct
  source 1..28: mol_type = other DNA
aggtccttattaacctcctgaacacagg

SEQ ID NO: 4419 - DNA, 28 bp, synthetic construct
  source 1..28: mol_type = other DNA
gtgttcaggaggttaataaggacctagg

SEQ ID NO: 4420 - DNA, 28 bp, synthetic construct
  source 1..28: mol_type = other DNA
ggttaataaggacctaggctctgcctgg

SEQ ID NO: 4421 - DNA, 28 bp, synthetic construct
  source 1..28: mol_type = other DNA
gttaataaggacctaggctctgcctggg

SEQ ID NO: 4422 - DNA, 28 bp, synthetic construct
  source 1..28: mol_type = other DNA
ttaataaggacctaggctctgcctgggg

SEQ ID NO: 4423 - DNA, 28 bp, synthetic construct
  source 1..28: mol_type = other DNA
ggacctaggctctgcctggggaaagagg

SEQ ID NO: 4424 - DNA, 28 bp, synthetic construct
  source 1..28: mol_type = other DNA
atacctctttccccaggcagagcctagg

SEQ ID NO: 4425 - DNA, 28 bp, synthetic construct
  source 1..28: mol_type = other DNA
gctctgcctggggaaagaggtatcgtgg

SEQ ID NO: 4426 - DNA, 28 bp, synthetic construct
  source 1..28: mol_type = other DNA
ctctgcctggggaaagaggtatcgtggg

SEQ ID NO: 4427 - DNA, 28 bp, synthetic construct
  source 1..28: mol_type = other DNA
tctgcctggggaaagaggtatcgtgggg

SEQ ID NO: 4428 - DNA, 28 bp, synthetic construct
  source 1..28: mol_type = other DNA
ctggccccacgatacctctttccccagg

SEQ ID NO: 4429 - DNA, 28 bp, synthetic construct
  source 1..28: mol_type = other DNA
ctggggaaagaggtatcgtggggccagg

SEQ ID NO: 4430 - DNA, 28 bp, synthetic construct
  source 1..28: mol_type = other DNA
tggggaaagaggtatcgtggggccaggg

SEQ ID NO: 4431 - DNA, 28 bp, synthetic construct
  source 1..28: mol_type = other DNA
ggaaagaggtatcgtggggccagggagg

SEQ ID NO: 4432 - DNA, 28 bp, synthetic construct
  source 1..28: mol_type = other DNA
aagaggtatcgtggggccagggaggcgg

SEQ ID NO: 4433 - DNA, 28 bp, synthetic construct
  source 1..28: mol_type = other DNA
agaggtatcgtggggccagggaggcggg

SEQ ID NO: 4434 - DNA, 28 bp, synthetic construct
  source 1..28: mol_type = other DNA
gtatcgtggggccagggaggcgggaagg

SEQ ID NO: 4435 - DNA, 28 bp, synthetic construct
  source 1..28: mol_type = other DNA
tatcgtggggccagggaggcgggaaggg

SEQ ID NO: 4436 - DNA, 28 bp, synthetic construct
  source 1..28: mol_type = other DNA
tggggccagggaggcgggaagggactgg

SEQ ID NO: 4437 - DNA, 28 bp, synthetic construct
  source 1..28: mol_type = other DNA
ggggccagggaggcgggaagggactggg

SEQ ID NO: 4438 - DNA, 28 bp, synthetic construct
  source 1..28: mol_type = other DNA
ggtgcccagtcccttcccgcctccctgg

SEQ ID NO: 4439 - DNA, 28 bp, synthetic construct
  source 1..28: mol_type = other DNA
gggaggcgggaagggactgggcaccagg

SEQ ID NO: 4440 - DNA, 28 bp, synthetic construct
  source 1..28: mol_type = other DNA
ggaggcgggaagggactgggcaccaggg

SEQ ID NO: 4441 - DNA, 28 bp, synthetic construct
  source 1..28: mol_type = other DNA
gaagggactgggcaccagggcttccagg

SEQ ID NO: 4442 - DNA, 28 bp, synthetic construct
  source 1..28: mol_type = other DNA
cagacggcttctctcctggaagccctgg

SEQ ID NO: 4443 - DNA, 28 bp, synthetic construct
  source 1..28: mol_type = other DNA
gacagctctcagacggcttctctcctgg

SEQ ID NO: 4444 - DNA, 28 bp, synthetic construct
  source 1..28: mol_type = other DNA
gaagccgtctgagagctgtctgtagagg

SEQ ID NO: 4445 - DNA, 28 bp, synthetic construct
  source 1..28: mol_type = other DNA
aagccgtctgagagctgtctgtagaggg

SEQ ID NO: 4446 - DNA, 28 bp, synthetic construct
  source 1..28: mol_type = other DNA
ctgccctctacagacagctctcagacgg

SEQ ID NO: 4447 - DNA, 28 bp, synthetic construct
  source 1..28: mol_type = other DNA
gtagagggcagtgtgtcccagtgtgagg

SEQ ID NO: 4448 - DNA, 28 bp, synthetic construct
  source 1..28: mol_type = other DNA
ggcacttggttactggcctcacactggg

SEQ ID NO: 4449 - DNA, 28 bp, synthetic construct
  source 1..28: mol_type = other DNA
gggcacttggttactggcctcacactgg

SEQ ID NO: 4450 - DNA, 28 bp, synthetic construct
  source 1..28: mol_type = other DNA
ctggctaggctgggcacttggttactgg

SEQ ID NO: 4451 - DNA, 28 bp, synthetic construct
  source 1..28: mol_type = other DNA
cagtaaccaagtgcccagcctagccagg

SEQ ID NO: 4452 - DNA, 28 bp, synthetic construct
  source 1..28: mol_type = other DNA
taaaaacctggctaggctgggcacttgg

SEQ ID NO: 4453 - DNA, 28 bp, synthetic construct
  source 1..28: mol_type = other DNA
tgcccagcctagccaggtttttatgtgg

SEQ ID NO: 4454 - DNA, 28 bp, synthetic construct
  source 1..28: mol_type = other DNA
ggccacataaaaacctggctaggctggg

SEQ ID NO: 4455 - DNA, 28 bp, synthetic construct
  source 1..28: mol_type = other DNA
gggccacataaaaacctggctaggctgg

SEQ ID NO: 4456 - DNA, 28 bp, synthetic construct
  source 1..28: mol_type = other DNA
caaggggccacataaaaacctggctagg

SEQ ID NO: 4457 - DNA, 28 bp, synthetic construct
  source 1..28: mol_type = other DNA
catcacaaggggccacataaaaacctgg

SEQ ID NO: 4458 - DNA, 28 bp, synthetic construct
  source 1..28: mol_type = other DNA
gtttttatgtggccccttgtgatgctgg

SEQ ID NO: 4459 - DNA, 28 bp, synthetic construct
  source 1..28: mol_type = other DNA
tttttatgtggccccttgtgatgctggg

SEQ ID NO: 4460 - DNA, 28 bp, synthetic construct
  source 1..28: mol_type = other DNA
ttttatgtggccccttgtgatgctgggg

SEQ ID NO: 4461 - DNA, 28 bp, synthetic construct
  source 1..28: mol_type = other DNA
atgtgaggagccccagcatcacaagggg

SEQ ID NO: 4462 - DNA, 28 bp, synthetic construct
  source 1..28: mol_type = other DNA
catgtgaggagccccagcatcacaaggg

SEQ ID NO: 4463 - DNA, 28 bp, synthetic construct
  source 1..28: mol_type = other DNA
gcatgtgaggagccccagcatcacaagg

SEQ ID NO: 4464 - DNA, 28 bp, synthetic construct
  source 1..28: mol_type = other DNA
gtgtatttttgaatgaaggcatgtgagg

SEQ ID NO: 4465 - DNA, 28 bp, synthetic construct
  source 1..28: mol_type = other DNA
tcacatgccttcattcaaaaatacacgg

SEQ ID NO: 4466 - DNA, 28 bp, synthetic construct
  source 1..28: mol_type = other DNA
ggctgctccgtgtatttttgaatgaagg

SEQ ID NO: 4467 - DNA, 28 bp, synthetic construct
  source 1..28: mol_type = other DNA
tcattcaaaaatacacggagcagccagg

SEQ ID NO: 4468 - DNA, 28 bp, synthetic construct
  source 1..28: mol_type = other DNA
acggagcagccaggcacctactccatgg

SEQ ID NO: 4469 - DNA, 28 bp, synthetic construct
  source 1..28: mol_type = other DNA
cgtgcgaggccatggagtaggtgcctgg

SEQ ID NO: 4470 - DNA, 28 bp, synthetic construct
  source 1..28: mol_type = other DNA
cgattgtcgtgcgaggccatggagtagg

SEQ ID NO: 4471 - DNA, 28 bp, synthetic construct
  source 1..28: mol_type = other DNA
ctactccatggcctcgcacgacaatcgg

SEQ ID NO: 4472 - DNA, 28 bp, synthetic construct
  source 1..28: mol_type = other DNA
tgattccgattgtcgtgcgaggccatgg

SEQ ID NO: 4473 - DNA, 28 bp, synthetic construct
  source 1..28: mol_type = other DNA
atttagtgattccgattgtcgtgcgagg

SEQ ID NO: 4474 - DNA, 28 bp, synthetic construct
  source 1..28: mol_type = other DNA
tgggatggtgggcggtcggtggtcgggg

SEQ ID NO: 4475 - DNA, 28 bp, synthetic construct
  source 1..28: mol_type = other DNA
ttgggatggtgggcggtcggtggtcggg

SEQ ID NO: 4476 - DNA, 28 bp, synthetic construct
  source 1..28: mol_type = other DNA
cttgggatggtgggcggtcggtggtcgg

SEQ ID NO: 4477 - DNA, 28 bp, synthetic construct
  source 1..28: mol_type = other DNA
ggggcttgggatggtgggcggtcggtgg

SEQ ID NO: 4478 - DNA, 28 bp, synthetic construct
  source 1..28: mol_type = other DNA
accgaccgcccaccatcccaagccccgg

SEQ ID NO: 4479 - DNA, 28 bp, synthetic construct
  source 1..28: mol_type = other DNA
gccggggcttgggatggtgggcggtcgg

SEQ ID NO: 4480 - DNA, 28 bp, synthetic construct
  source 1..28: mol_type = other DNA
cacggccggggcttgggatggtgggcgg

SEQ ID NO: 4481 - DNA, 28 bp, synthetic construct
  source 1..28: mol_type = other DNA
acacacggccggggcttgggatggtggg

SEQ ID NO: 4482 - DNA, 28 bp, synthetic construct
  source 1..28: mol_type = other DNA
cacacacggccggggcttgggatggtgg

SEQ ID NO: 4483 - DNA, 28 bp, synthetic construct
  source 1..28: mol_type = other DNA
ccacacacacggccggggcttgggatgg

SEQ ID NO: 4484 - DNA, 28 bp, synthetic construct
  source 1..28: mol_type = other DNA
ccatcccaagccccggccgtgtgtgtgg

SEQ ID NO: 4485 - DNA, 28 bp, synthetic construct
  source 1..28: mol_type = other DNA
tcccaagccccggccgtgtgtgtggtgg

SEQ ID NO: 4486 - DNA, 28 bp, synthetic construct
  source 1..28: mol_type = other DNA
cccaccacacacacggccggggcttggg

SEQ ID NO: 4487 - DNA, 28 bp, synthetic construct
  source 1..28: mol_type = other DNA
cccaagccccggccgtgtgtgtggtggg

SEQ ID NO: 4488 - DNA, 28 bp, synthetic construct
  source 1..28: mol_type = other DNA
tcccaccacacacacggccggggcttgg

SEQ ID NO: 4489 - DNA, 28 bp, synthetic construct
  source 1..28: mol_type = other DNA
agccccggccgtgtgtgtggtgggaagg

SEQ ID NO: 4490 - DNA, 28 bp, synthetic construct
  source 1..28: mol_type = other DNA
tgccttcccaccacacacacggccgggg

SEQ ID NO: 4491 - DNA, 28 bp, synthetic construct
  source 1..28: mol_type = other DNA
ctgccttcccaccacacacacggccggg

SEQ ID NO: 4492 - DNA, 28 bp, synthetic construct
  source 1..28: mol_type = other DNA
actgccttcccaccacacacacggccgg

SEQ ID NO: 4493 - DNA, 28 bp, synthetic construct
  source 1..28: mol_type = other DNA
aaagactgccttcccaccacacacacgg

SEQ ID NO: 4494 - DNA, 28 bp, synthetic construct
  source 1..28: mol_type = other DNA
tgtgtggtgggaaggcagtctttgaagg

SEQ ID NO: 4495 - DNA, 28 bp, synthetic construct
  source 1..28: mol_type = other DNA
gtgtggtgggaaggcagtctttgaaggg

SEQ ID NO: 4496 - DNA, 28 bp, synthetic construct
  source 1..28: mol_type = other DNA
cagtctttgaagggcagatgcctgacgg

SEQ ID NO: 4497 - DNA, 28 bp, synthetic construct
  source 1..28: mol_type = other DNA
aagggcagatgcctgacggagcagtagg

SEQ ID NO: 4498 - DNA, 28 bp, synthetic construct
  source 1..28: mol_type = other DNA
ggcagatgcctgacggagcagtaggagg

SEQ ID NO: 4499 - DNA, 28 bp, synthetic construct
  source 1..28: mol_type = other DNA
gcagatgcctgacggagcagtaggaggg

SEQ ID NO: 4500 - DNA, 28 bp, synthetic construct
  source 1..28: mol_type = other DNA
cagatgcctgacggagcagtaggagggg

SEQ ID NO: 4501 - DNA, 28 bp, synthetic construct
  source 1..28: mol_type = other DNA
agatgcctgacggagcagtaggaggggg

SEQ ID NO: 4502 - DNA, 28 bp, synthetic construct
  source 1..28: mol_type = other DNA
gatttccccctcctactgctccgtcagg

SEQ ID NO: 4503 - DNA, 28 bp, synthetic construct
  source 1..28: mol_type = other DNA
gagcagtaggagggggaaatctatgagg

SEQ ID NO: 4504 - DNA, 28 bp, synthetic construct
  source 1..28: mol_type = other DNA
agtaggagggggaaatctatgaggaagg

SEQ ID NO: 4505 - DNA, 28 bp, synthetic construct
  source 1..28: mol_type = other DNA
gtaggagggggaaatctatgaggaaggg

SEQ ID NO: 4506 - DNA, 28 bp, synthetic construct
  source 1..28: mol_type = other DNA
taggagggggaaatctatgaggaagggg

SEQ ID NO: 4507 - DNA, 28 bp, synthetic construct
  source 1..28: mol_type = other DNA
agggggaaatctatgaggaaggggtcgg

SEQ ID NO: 4508 - DNA, 28 bp, synthetic construct
  source 1..28: mol_type = other DNA
gggggaaatctatgaggaaggggtcggg

SEQ ID NO: 4509 - DNA, 28 bp, synthetic construct
  source 1..28: mol_type = other DNA
ggggaaatctatgaggaaggggtcgggg

SEQ ID NO: 4510 - DNA, 28 bp, synthetic construct
  source 1..28: mol_type = other DNA
gggaaatctatgaggaaggggtcggggg

SEQ ID NO: 4511 - DNA, 28 bp, synthetic construct
  source 1..28: mol_type = other DNA
atctatgaggaaggggtcgggggagagg

SEQ ID NO: 4512 - DNA, 28 bp, synthetic construct
  source 1..28: mol_type = other DNA
tatgaggaaggggtcgggggagaggagg

SEQ ID NO: 4513 - DNA, 28 bp, synthetic construct
  source 1..28: mol_type = other DNA
atgaggaaggggtcgggggagaggaggg

SEQ ID NO: 4514 - DNA, 28 bp, synthetic construct
  source 1..28: mol_type = other DNA
gaaggggtcgggggagaggagggctagg

SEQ ID NO: 4515 - DNA, 28 bp, synthetic construct
  source 1..28: mol_type = other DNA
cgggggagaggagggctaggaaaccagg

SEQ ID NO: 4516 - DNA, 28 bp, synthetic construct
  source 1..28: mol_type = other DNA
gagaggagggctaggaaaccaggtttgg

SEQ ID NO: 4517 - DNA, 28 bp, synthetic construct
  source 1..28: mol_type = other DNA
agaggagggctaggaaaccaggtttggg

SEQ ID NO: 4518 - DNA, 28 bp, synthetic construct
  source 1..28: mol_type = other DNA
gaggagggctaggaaaccaggtttgggg

SEQ ID NO: 4519 - DNA, 28 bp, synthetic construct
  source 1..28: mol_type = other DNA
ctcagacgtgatgaatccccaaacctgg

SEQ ID NO: 4520 - DNA, 28 bp, synthetic construct
  source 1..28: mol_type = other DNA
gtctgagaatgcaccattttttcactgg

SEQ ID NO: 4521 - DNA, 28 bp, synthetic construct
  source 1..28: mol_type = other DNA
tctgagaatgcaccattttttcactggg

SEQ ID NO: 4522 - DNA, 28 bp, synthetic construct
  source 1..28: mol_type = other DNA
atcaaattggagcccagtgaaaaaatgg

SEQ ID NO: 4523 - DNA, 28 bp, synthetic construct
  source 1..28: mol_type = other DNA
gaggtgcagctggacgacatcaaattgg

SEQ ID NO: 4524 - DNA, 28 bp, synthetic construct
  source 1..28: mol_type = other DNA
tcttcattttggggagaggtgcagctgg

SEQ ID NO: 4525 - DNA, 28 bp, synthetic construct
  source 1..28: mol_type = other DNA
gctgcacctctccccaaaatgaagacgg

SEQ ID NO: 4526 - DNA, 28 bp, synthetic construct
  source 1..28: mol_type = other DNA
ctgcacctctccccaaaatgaagacggg

SEQ ID NO: 4527 - DNA, 28 bp, synthetic construct
  source 1..28: mol_type = other DNA
tgcacctctccccaaaatgaagacgggg

SEQ ID NO: 4528 - DNA, 28 bp, synthetic construct
  source 1..28: mol_type = other DNA
ccttccccgtcttcattttggggagagg

SEQ ID NO: 4529 - DNA, 28 bp, synthetic construct
  source 1..28: mol_type = other DNA
cctctccccaaaatgaagacggggaagg

SEQ ID NO: 4530 - DNA, 28 bp, synthetic construct
  source 1..28: mol_type = other DNA
tctcgccttccccgtcttcattttgggg

SEQ ID NO: 4531 - DNA, 28 bp, synthetic construct
  source 1..28: mol_type = other DNA
atctcgccttccccgtcttcattttggg

SEQ ID NO: 4532 - DNA, 28 bp, synthetic construct
  source 1..28: mol_type = other DNA
gatctcgccttccccgtcttcattttgg

SEQ ID NO: 4533 - DNA, 28 bp, synthetic construct
  source 1..28: mol_type = other DNA
aatgaagacggggaaggcgagatccagg

SEQ ID NO: 4534 - DNA, 28 bp, synthetic construct
  source 1..28: mol_type = other DNA
gcttgcagattgggagctctggacctgg

SEQ ID NO: 4535 - DNA, 28 bp, synthetic construct
  source 1..28: mol_type = other DNA
gcaatggcttgcagattgggagctctgg

SEQ ID NO: 4536 - DNA, 28 bp, synthetic construct
  source 1..28: mol_type = other DNA
tgggatttgcaatggcttgcagattggg

SEQ ID NO: 4537 - DNA, 28 bp, synthetic construct
  source 1..28: mol_type = other DNA
ctgggatttgcaatggcttgcagattgg

SEQ ID NO: 4538 - DNA, 28 bp, synthetic construct
  source 1..28: mol_type = other DNA
gctggggaggggctgggatttgcaatgg

SEQ ID NO: 4539 - DNA, 28 bp, synthetic construct
  source 1..28: mol_type = other DNA
aagaaactgaggctggggaggggctggg

SEQ ID NO: 4540 - DNA, 28 bp, synthetic construct
  source 1..28: mol_type = other DNA
gaagaaactgaggctggggaggggctgg

SEQ ID NO: 4541 - DNA, 28 bp, synthetic construct
  source 1..28: mol_type = other DNA
tgcggaagaaactgaggctggggagggg

SEQ ID NO: 4542 - DNA, 28 bp, synthetic construct
  source 1..28: mol_type = other DNA
ctgcggaagaaactgaggctggggaggg

SEQ ID NO: 4543 - DNA, 28 bp, synthetic construct
  source 1..28: mol_type = other DNA
gctgcggaagaaactgaggctggggagg

SEQ ID NO: 4544 - DNA, 28 bp, synthetic construct
  source 1..28: mol_type = other DNA
ccggctgcggaagaaactgaggctgggg

SEQ ID NO: 4545 - DNA, 28 bp, synthetic construct
  source 1..28: mol_type = other DNA
ccccagcctcagtttcttccgcagccgg

SEQ ID NO: 4546 - DNA, 28 bp, synthetic construct
  source 1..28: mol_type = other DNA
cccggctgcggaagaaactgaggctggg

SEQ ID NO: 4547 - DNA, 28 bp, synthetic construct
  source 1..28: mol_type = other DNA
cccagcctcagtttcttccgcagccggg

SEQ ID NO: 4548 - DNA, 28 bp, synthetic construct
  source 1..28: mol_type = other DNA
acccggctgcggaagaaactgaggctgg

SEQ ID NO: 4549 - DNA, 28 bp, synthetic construct
  source 1..28: mol_type = other DNA
cactacccggctgcggaagaaactgagg

SEQ ID NO: 4550 - DNA, 28 bp, synthetic construct
  source 1..28: mol_type = other DNA
ctcagtttcttccgcagccgggtagtgg

SEQ ID NO: 4551 - DNA, 28 bp, synthetic construct
  source 1..28: mol_type = other DNA
tcagtttcttccgcagccgggtagtggg

SEQ ID NO: 4552 - DNA, 28 bp, synthetic construct
  source 1..28: mol_type = other DNA
ttccgcagccgggtagtgggagcgcagg

SEQ ID NO: 4553 - DNA, 28 bp, synthetic construct
  source 1..28: mol_type = other DNA
tccgcagccgggtagtgggagcgcaggg

SEQ ID NO: 4554 - DNA, 28 bp, synthetic construct
  source 1..28: mol_type = other DNA
tccctgcgctcccactacccggctgcgg

SEQ ID NO: 4555 - DNA, 28 bp, synthetic construct
  source 1..28: mol_type = other DNA
gcagccgggtagtgggagcgcagggagg

SEQ ID NO: 4556 - DNA, 28 bp, synthetic construct
  source 1..28: mol_type = other DNA
cagccgggtagtgggagcgcagggaggg

SEQ ID NO: 4557 - DNA, 28 bp, synthetic construct
  source 1..28: mol_type = other DNA
ctgccctccctgcgctcccactacccgg

SEQ ID NO: 4558 - DNA, 28 bp, synthetic construct
  source 1..28: mol_type = other DNA
agtgggagcgcagggagggcagtcgagg

SEQ ID NO: 4559 - DNA, 28 bp, synthetic construct
  source 1..28: mol_type = other DNA
cgcagggagggcagtcgaggccaccagg

SEQ ID NO: 4560 - DNA, 28 bp, synthetic construct
  source 1..28: mol_type = other DNA
gcagggagggcagtcgaggccaccaggg

SEQ ID NO: 4561 - DNA, 28 bp, synthetic construct
  source 1..28: mol_type = other DNA
agtcgaggccaccagggaccttgcccgg

SEQ ID NO: 4562 - DNA, 28 bp, synthetic construct
  source 1..28: mol_type = other DNA
gggcggggccgggcaaggtccctggtgg

SEQ ID NO: 4563 - DNA, 28 bp, synthetic construct
  source 1..28: mol_type = other DNA
actgggcggggccgggcaaggtccctgg

SEQ ID NO: 4564 - DNA, 28 bp, synthetic construct
  source 1..28: mol_type = other DNA
ctcggaaactgggcggggccgggcaagg

SEQ ID NO: 4565 - DNA, 28 bp, synthetic construct
  source 1..28: mol_type = other DNA
cttgcccggccccgcccagtttccgagg

SEQ ID NO: 4566 - DNA, 28 bp, synthetic construct
  source 1..28: mol_type = other DNA
agttcctcggaaactgggcggggccggg

SEQ ID NO: 4567 - DNA, 28 bp, synthetic construct
  source 1..28: mol_type = other DNA
cagttcctcggaaactgggcggggccgg

SEQ ID NO: 4568 - DNA, 28 bp, synthetic construct
  source 1..28: mol_type = other DNA
cggccccgcccagtttccgaggaactgg

SEQ ID NO: 4569 - DNA, 28 bp, synthetic construct
  source 1..28: mol_type = other DNA
ggccccgcccagtttccgaggaactggg

SEQ ID NO: 4570 - DNA, 28 bp, synthetic construct
  source 1..28: mol_type = other DNA
ggcccagttcctcggaaactgggcgggg

SEQ ID NO: 4571 - DNA, 28 bp, synthetic construct
  source 1..28: mol_type = other DNA
cggcccagttcctcggaaactgggcggg

SEQ ID NO: 4572 - DNA, 28 bp, synthetic construct
  source 1..28: mol_type = other DNA
ccggcccagttcctcggaaactgggcgg

SEQ ID NO: 4573 - DNA, 28 bp, synthetic construct
  source 1..28: mol_type = other DNA
ccgcccagtttccgaggaactgggccgg

SEQ ID NO: 4574 - DNA, 28 bp, synthetic construct
  source 1..28: mol_type = other DNA
cgcccagtttccgaggaactgggccggg

SEQ ID NO: 4575 - DNA, 28 bp, synthetic construct
  source 1..28: mol_type = other DNA
gcccagtttccgaggaactgggccgggg

SEQ ID NO: 4576 - DNA, 28 bp, synthetic construct
  source 1..28: mol_type = other DNA
accccggcccagttcctcggaaactggg

SEQ ID NO: 4577 - DNA, 28 bp, synthetic construct
  source 1..28: mol_type = other DNA
caccccggcccagttcctcggaaactgg

SEQ ID NO: 4578 - DNA, 28 bp, synthetic construct
  source 1..28: mol_type = other DNA
cagtttccgaggaactgggccggggtgg

SEQ ID NO: 4579 - DNA, 28 bp, synthetic construct
  source 1..28: mol_type = other DNA
tttccgaggaactgggccggggtggagg

SEQ ID NO: 4580 - DNA, 28 bp, synthetic construct
  source 1..28: mol_type = other DNA
gcgcctccaccccggcccagttcctcgg

SEQ ID NO: 4581 - DNA, 28 bp, synthetic construct
  source 1..28: mol_type = other DNA
cctggcggcgcgggcgcctccaccccgg

SEQ ID NO: 4582 - DNA, 28 bp, synthetic construct
  source 1..28: mol_type = other DNA
ccggggtggaggcgcccgcgccgccagg

SEQ ID NO: 4583 - DNA, 28 bp, synthetic construct
  source 1..28: mol_type = other DNA
cggggtggaggcgcccgcgccgccaggg

SEQ ID NO: 4584 - DNA, 28 bp, synthetic construct
  source 1..28: mol_type = other DNA
ggggtggaggcgcccgcgccgccagggg

SEQ ID NO: 4585 - DNA, 28 bp, synthetic construct
  source 1..28: mol_type = other DNA
gcttcagaggaacccctggcggcgcggg

SEQ ID NO: 4586 - DNA, 28 bp, synthetic construct
  source 1..28: mol_type = other DNA
ggcttcagaggaacccctggcggcgcgg

SEQ ID NO: 4587 - DNA, 28 bp, synthetic construct
  source 1..28: mol_type = other DNA
ccacaggcttcagaggaacccctggcgg

SEQ ID NO: 4588 - DNA, 28 bp, synthetic construct
  source 1..28: mol_type = other DNA
ccgccaggggttcctctgaagcctgtgg

SEQ ID NO: 4589 - DNA, 28 bp, synthetic construct
  source 1..28: mol_type = other DNA
tgaccacaggcttcagaggaacccctgg

SEQ ID NO: 4590 - DNA, 28 bp, synthetic construct
  source 1..28: mol_type = other DNA
aggggttcctctgaagcctgtggtcagg

SEQ ID NO: 4591 - DNA, 28 bp, synthetic construct
  source 1..28: mol_type = other DNA
gcggcggcctgaccacaggcttcagagg

SEQ ID NO: 4592 - DNA, 28 bp, synthetic construct
  source 1..28: mol_type = other DNA
agcctgtggtcaggccgccgcttcccgg

SEQ ID NO: 4593 - DNA, 28 bp, synthetic construct
  source 1..28: mol_type = other DNA
gcctgtggtcaggccgccgcttcccggg

SEQ ID NO: 4594 - DNA, 28 bp, synthetic construct
  source 1..28: mol_type = other DNA
tcccgggaagcggcggcctgaccacagg

SEQ ID NO: 4595 - DNA, 28 bp, synthetic construct
  source 1..28: mol_type = other DNA
ttggctcgggcttcccgggaagcggcgg

SEQ ID NO: 4596 - DNA, 28 bp, synthetic construct
  source 1..28: mol_type = other DNA
gtcttggctcgggcttcccgggaagcgg

SEQ ID NO: 4597 - DNA, 28 bp, synthetic construct
  source 1..28: mol_type = other DNA
tctctggtcttggctcgggcttcccggg

SEQ ID NO: 4598 - DNA, 28 bp, synthetic construct
  source 1..28: mol_type = other DNA
gtctctggtcttggctcgggcttcccgg

SEQ ID NO: 4599 - DNA, 28 bp, synthetic construct
  source 1..28: mol_type = other DNA
aagcccgagccaagaccagagaccgcgg

SEQ ID NO: 4600 - DNA, 28 bp, synthetic construct
  source 1..28: mol_type = other DNA
cggccgcggtctctggtcttggctcggg

SEQ ID NO: 4601 - DNA, 28 bp, synthetic construct
  source 1..28: mol_type = other DNA
ccggccgcggtctctggtcttggctcgg

SEQ ID NO: 4602 - DNA, 28 bp, synthetic construct
  source 1..28: mol_type = other DNA
ccgagccaagaccagagaccgcggccgg

SEQ ID NO: 4603 - DNA, 28 bp, synthetic construct
  source 1..28: mol_type = other DNA
gccaagaccagagaccgcggccggccgg

SEQ ID NO: 4604 - DNA, 28 bp, synthetic construct
  source 1..28: mol_type = other DNA
cccggccggccgcggtctctggtcttgg

SEQ ID NO: 4605 - DNA, 28 bp, synthetic construct
  source 1..28: mol_type = other DNA
ccaagaccagagaccgcggccggccggg

SEQ ID NO: 4606 - DNA, 28 bp, synthetic construct
  source 1..28: mol_type = other DNA
caagaccagagaccgcggccggccgggg

SEQ ID NO: 4607 - DNA, 28 bp, synthetic construct
  source 1..28: mol_type = other DNA
cgaagccccggccggccgcggtctctgg

SEQ ID NO: 4608 - DNA, 28 bp, synthetic construct
  source 1..28: mol_type = other DNA
cagagaccgcggccggccggggcttcgg

SEQ ID NO: 4609 - DNA, 28 bp, synthetic construct
  source 1..28: mol_type = other DNA
agagaccgcggccggccggggcttcggg

SEQ ID NO: 4610 - DNA, 28 bp, synthetic construct
  source 1..28: mol_type = other DNA
gctgtcccgaagccccggccggccgcgg

SEQ ID NO: 4611 - DNA, 28 bp, synthetic construct
  source 1..28: mol_type = other DNA
cggccggccggggcttcgggacagcagg

SEQ ID NO: 4612 - DNA, 28 bp, synthetic construct
  source 1..28: mol_type = other DNA
ggccggccggggcttcgggacagcaggg

SEQ ID NO: 4613 - DNA, 28 bp, synthetic construct
  source 1..28: mol_type = other DNA
cgccctgctgtcccgaagccccggccgg

SEQ ID NO: 4614 - DNA, 28 bp, synthetic construct
  source 1..28: mol_type = other DNA
cggccggggcttcgggacagcagggcgg

SEQ ID NO: 4615 - DNA, 28 bp, synthetic construct
  source 1..28: mol_type = other DNA
ggccggggcttcgggacagcagggcggg

SEQ ID NO: 4616 - DNA, 28 bp, synthetic construct
  source 1..28: mol_type = other DNA
cgcccgccctgctgtcccgaagccccgg

SEQ ID NO: 4617 - DNA, 28 bp, synthetic construct
  source 1..28: mol_type = other DNA
ttcgggacagcagggcgggcgactgagg

SEQ ID NO: 4618 - DNA, 28 bp, synthetic construct
  source 1..28: mol_type = other DNA
tcgggacagcagggcgggcgactgaggg

SEQ ID NO: 4619 - DNA, 28 bp, synthetic construct
  source 1..28: mol_type = other DNA
cagggcgggcgactgagggcgtcgacgg

SEQ ID NO: 4620 - DNA, 28 bp, synthetic construct
  source 1..28: mol_type = other DNA
ggcgggcgactgagggcgtcgacggcgg

SEQ ID NO: 4621 - DNA, 28 bp, synthetic construct
  source 1..28: mol_type = other DNA
gcgggcgactgagggcgtcgacggcggg

SEQ ID NO: 4622 - DNA, 28 bp, synthetic construct
  source 1..28: mol_type = other DNA
ggcgactgagggcgtcgacggcgggtgg

SEQ ID NO: 4623 - DNA, 28 bp, synthetic construct
  source 1..28: mol_type = other DNA
tgagggcgtcgacggcgggtggagcagg

SEQ ID NO: 4624 - DNA, 28 bp, synthetic construct
  source 1..28: mol_type = other DNA
gagggcgtcgacggcgggtggagcaggg

SEQ ID NO: 4625 - DNA, 28 bp, synthetic construct
  source 1..28: mol_type = other DNA
agggcgtcgacggcgggtggagcagggg

SEQ ID NO: 4626 - DNA, 28 bp, synthetic construct
  source 1..28: mol_type = other DNA
gtcgacggcgggtggagcaggggctagg

SEQ ID NO: 4627 - DNA, 28 bp, synthetic construct
  source 1..28: mol_type = other DNA
gacggcgggtggagcaggggctaggagg

SEQ ID NO: 4628 - DNA, 28 bp, synthetic construct
  source 1..28: mol_type = other DNA
acggcgggtggagcaggggctaggaggg

SEQ ID NO: 4629 - DNA, 28 bp, synthetic construct
  source 1..28: mol_type = other DNA
cggcgggtggagcaggggctaggagggg

SEQ ID NO: 4630 - DNA, 28 bp, synthetic construct
  source 1..28: mol_type = other DNA
ggcgggtggagcaggggctaggaggggg

SEQ ID NO: 4631 - DNA, 28 bp, synthetic construct
  source 1..28: mol_type = other DNA
ggagcaggggctaggagggggtctacgg

SEQ ID NO: 4632 - DNA, 28 bp, synthetic construct
  source 1..28: mol_type = other DNA
gagcaggggctaggagggggtctacggg

SEQ ID NO: 4633 - DNA, 28 bp, synthetic construct
  source 1..28: mol_type = other DNA
caggggctaggagggggtctacgggtgg

SEQ ID NO: 4634 - DNA, 28 bp, synthetic construct
  source 1..28: mol_type = other DNA
aggggctaggagggggtctacgggtggg

SEQ ID NO: 4635 - DNA, 28 bp, synthetic construct
  source 1..28: mol_type = other DNA
ggggctaggagggggtctacgggtgggg

SEQ ID NO: 4636 - DNA, 28 bp, synthetic construct
  source 1..28: mol_type = other DNA
taggagggggtctacgggtggggtcagg

SEQ ID NO: 4637 - DNA, 28 bp, synthetic construct
  source 1..28: mol_type = other DNA
ggggtctacgggtggggtcaggctcagg

SEQ ID NO: 4638 - DNA, 28 bp, synthetic construct
  source 1..28: mol_type = other DNA
gggtctacgggtggggtcaggctcaggg

SEQ ID NO: 4639 - DNA, 28 bp, synthetic construct
  source 1..28: mol_type = other DNA
ctacgggtggggtcaggctcagggttgg

SEQ ID NO: 4640 - DNA, 28 bp, synthetic construct
  source 1..28: mol_type = other DNA
tacgggtggggtcaggctcagggttggg

SEQ ID NO: 4641 - DNA, 28 bp, synthetic construct
  source 1..28: mol_type = other DNA
acgggtggggtcaggctcagggttgggg

SEQ ID NO: 4642 - DNA, 28 bp, synthetic construct
  source 1..28: mol_type = other DNA
ggctcagggttggggacaccttctgtgg

SEQ ID NO: 4643 - DNA, 28 bp, synthetic construct
  source 1..28: mol_type = other DNA
ttggggacaccttctgtggcctcctagg

SEQ ID NO: 4644 - DNA, 28 bp, synthetic construct
  source 1..28: mol_type = other DNA
tggggacaccttctgtggcctcctaggg

SEQ ID NO: 4645 - DNA, 28 bp, synthetic construct
  source 1..28: mol_type = other DNA
ggggacaccttctgtggcctcctagggg

SEQ ID NO: 4646 - DNA, 28 bp, synthetic construct
  source 1..28: mol_type = other DNA
gggacaccttctgtggcctcctaggggg

SEQ ID NO: 4647 - DNA, 28 bp, synthetic construct
  source 1..28: mol_type = other DNA
ccagatccccctaggaggccacagaagg

SEQ ID NO: 4648 - DNA, 28 bp, synthetic construct
  source 1..28: mol_type = other DNA
ccttctgtggcctcctagggggatctgg

SEQ ID NO: 4649 - DNA, 28 bp, synthetic construct
  source 1..28: mol_type = other DNA
tggcctcctagggggatctggctgcagg

SEQ ID NO: 4650 - DNA, 28 bp, synthetic construct
  source 1..28: mol_type = other DNA
ggcctcctagggggatctggctgcaggg

SEQ ID NO: 4651 - DNA, 28 bp, synthetic construct
  source 1..28: mol_type = other DNA
gcctcctagggggatctggctgcagggg

SEQ ID NO: 4652 - DNA, 28 bp, synthetic construct
  source 1..28: mol_type = other DNA
tcccctgcagccagatccccctaggagg

SEQ ID NO: 4653 - DNA, 28 bp, synthetic construct
  source 1..28: mol_type = other DNA
tcctagggggatctggctgcaggggagg

SEQ ID NO: 4654 - DNA, 28 bp, synthetic construct
  source 1..28: mol_type = other DNA
tcctcccctgcagccagatccccctagg

SEQ ID NO: 4655 - DNA, 28 bp, synthetic construct
  source 1..28: mol_type = other DNA
gggggatctggctgcaggggaggagagg

SEQ ID NO: 4656 - DNA, 28 bp, synthetic construct
  source 1..28: mol_type = other DNA
atctggctgcaggggaggagaggacagg

SEQ ID NO: 4657 - DNA, 28 bp, synthetic construct
  source 1..28: mol_type = other DNA
tctggctgcaggggaggagaggacaggg

SEQ ID NO: 4658 - DNA, 28 bp, synthetic construct
  source 1..28: mol_type = other DNA
ggaggagaggacagggctctgcccccgg

SEQ ID NO: 4659 - DNA, 28 bp, synthetic construct
  source 1..28: mol_type = other DNA
ggagaggacagggctctgcccccggcgg

SEQ ID NO: 4660 - DNA, 28 bp, synthetic construct
  source 1..28: mol_type = other DNA
gagaggacagggctctgcccccggcggg

SEQ ID NO: 4661 - DNA, 28 bp, synthetic construct
  source 1..28: mol_type = other DNA
gacagggctctgcccccggcgggtgtgg

SEQ ID NO: 4662 - DNA, 28 bp, synthetic construct
  source 1..28: mol_type = other DNA
tgcccccggcgggtgtggagacagctgg

SEQ ID NO: 4663 - DNA, 28 bp, synthetic construct
  source 1..28: mol_type = other DNA
gcccccggcgggtgtggagacagctggg

SEQ ID NO: 4664 - DNA, 28 bp, synthetic construct
  source 1..28: mol_type = other DNA
ccccagctgtctccacacccgccggggg

SEQ ID NO: 4665 - DNA, 28 bp, synthetic construct
  source 1..28: mol_type = other DNA
cccccggcgggtgtggagacagctgggg

SEQ ID NO: 4666 - DNA, 28 bp, synthetic construct
  source 1..28: mol_type = other DNA
gccccagctgtctccacacccgccgggg

SEQ ID NO: 4667 - DNA, 28 bp, synthetic construct
  source 1..28: mol_type = other DNA
cgccccagctgtctccacacccgccggg

SEQ ID NO: 4668 - DNA, 28 bp, synthetic construct
  source 1..28: mol_type = other DNA
ccgccccagctgtctccacacccgccgg

SEQ ID NO: 4669 - DNA, 28 bp, synthetic construct
  source 1..28: mol_type = other DNA
ccggcgggtgtggagacagctggggcgg

SEQ ID NO: 4670 - DNA, 28 bp, synthetic construct
  source 1..28: mol_type = other DNA
gcgggtgtggagacagctggggcggagg

SEQ ID NO: 4671 - DNA, 28 bp, synthetic construct
  source 1..28: mol_type = other DNA
ggtgtggagacagctggggcggaggagg

SEQ ID NO: 4672 - DNA, 28 bp, synthetic construct
  source 1..28: mol_type = other DNA
gtgtggagacagctggggcggaggaggg

SEQ ID NO: 4673 - DNA, 28 bp, synthetic construct
  source 1..28: mol_type = other DNA
cagctggggcggaggagggtgtgtcagg

SEQ ID NO: 4674 - DNA, 28 bp, synthetic construct
  source 1..28: mol_type = other DNA
agctggggcggaggagggtgtgtcaggg

SEQ ID NO: 4675 - DNA, 28 bp, synthetic construct
  source 1..28: mol_type = other DNA
agggtgtgtcagggcgcgtcccaagagg

SEQ ID NO: 4676 - DNA, 28 bp, synthetic construct
  source 1..28: mol_type = other DNA
gggtgtgtcagggcgcgtcccaagaggg

SEQ ID NO: 4677 - DNA, 28 bp, synthetic construct
  source 1..28: mol_type = other DNA
tgtcagggcgcgtcccaagagggcctgg

SEQ ID NO: 4678 - DNA, 28 bp, synthetic construct
  source 1..28: mol_type = other DNA
cagggcgcgtcccaagagggcctggcgg

SEQ ID NO: 4679 - DNA, 28 bp, synthetic construct
  source 1..28: mol_type = other DNA
ccactttctgccgccaggccctcttggg

SEQ ID NO: 4680 - DNA, 28 bp, synthetic construct
  source 1..28: mol_type = other DNA
cccaagagggcctggcggcagaaagtgg

SEQ ID NO: 4681 - DNA, 28 bp, synthetic construct
  source 1..28: mol_type = other DNA
tccactttctgccgccaggccctcttgg

SEQ ID NO: 4682 - DNA, 28 bp, synthetic construct
  source 1..28: mol_type = other DNA
gcctggcggcagaaagtggaacccgagg

SEQ ID NO: 4683 - DNA, 28 bp, synthetic construct
  source 1..28: mol_type = other DNA
acctcgggttccactttctgccgccagg

SEQ ID NO: 4684 - DNA, 28 bp, synthetic construct
  source 1..28: mol_type = other DNA
cggcagaaagtggaacccgaggtagcgg

SEQ ID NO: 4685 - DNA, 28 bp, synthetic construct
  source 1..28: mol_type = other DNA
ggcagaaagtggaacccgaggtagcggg

SEQ ID NO: 4686 - DNA, 28 bp, synthetic construct
  source 1..28: mol_type = other DNA
gcagaaagtggaacccgaggtagcgggg

SEQ ID NO: 4687 - DNA, 28 bp, synthetic construct
  source 1..28: mol_type = other DNA
ggaacccgaggtagcggggcaaaatcgg

SEQ ID NO: 4688 - DNA, 28 bp, synthetic construct
  source 1..28: mol_type = other DNA
gaacccgaggtagcggggcaaaatcggg

SEQ ID NO: 4689 - DNA, 28 bp, synthetic construct
  source 1..28: mol_type = other DNA
aacccgaggtagcggggcaaaatcgggg

SEQ ID NO: 4690 - DNA, 28 bp, synthetic construct
  source 1..28: mol_type = other DNA
gaccccgattttgccccgctacctcggg

SEQ ID NO: 4691 - DNA, 28 bp, synthetic construct
  source 1..28: mol_type = other DNA
cgaccccgattttgccccgctacctcgg

SEQ ID NO: 4692 - DNA, 28 bp, synthetic construct
  source 1..28: mol_type = other DNA
gcaaaatcggggtcgccaagtccgaagg

SEQ ID NO: 4693 - DNA, 28 bp, synthetic construct
  source 1..28: mol_type = other DNA
aaatcggggtcgccaagtccgaaggagg

SEQ ID NO: 4694 - DNA, 28 bp, synthetic construct
  source 1..28: mol_type = other DNA
aatcggggtcgccaagtccgaaggaggg

SEQ ID NO: 4695 - DNA, 28 bp, synthetic construct
  source 1..28: mol_type = other DNA
atcggggtcgccaagtccgaaggagggg

SEQ ID NO: 4696 - DNA, 28 bp, synthetic construct
  source 1..28: mol_type = other DNA
acttctcggacccctccttcggacttgg

SEQ ID NO: 4697 - DNA, 28 bp, synthetic construct
  source 1..28: mol_type = other DNA
aagtccgaaggaggggtccgagaagtgg

SEQ ID NO: 4698 - DNA, 28 bp, synthetic construct
  source 1..28: mol_type = other DNA
ccggccacttctcggacccctccttcgg

SEQ ID NO: 4699 - DNA, 28 bp, synthetic construct
  source 1..28: mol_type = other DNA
ccgaaggaggggtccgagaagtggccgg

SEQ ID NO: 4700 - DNA, 28 bp, synthetic construct
  source 1..28: mol_type = other DNA
aggaggggtccgagaagtggccggaagg

SEQ ID NO: 4701 - DNA, 28 bp, synthetic construct
  source 1..28: mol_type = other DNA
ggtccgagaagtggccggaaggcgcagg

SEQ ID NO: 4702 - DNA, 28 bp, synthetic construct
  source 1..28: mol_type = other DNA
gtccgagaagtggccggaaggcgcaggg

SEQ ID NO: 4703 - DNA, 28 bp, synthetic construct
  source 1..28: mol_type = other DNA
gaccctgcgccttccggccacttctcgg

SEQ ID NO: 4704 - DNA, 28 bp, synthetic construct
  source 1..28: mol_type = other DNA
gagaagtggccggaaggcgcagggtcgg

SEQ ID NO: 4705 - DNA, 28 bp, synthetic construct
  source 1..28: mol_type = other DNA
agaagtggccggaaggcgcagggtcggg

SEQ ID NO: 4706 - DNA, 28 bp, synthetic construct
  source 1..28: mol_type = other DNA
gaagtggccggaaggcgcagggtcgggg

SEQ ID NO: 4707 - DNA, 28 bp, synthetic construct
  source 1..28: mol_type = other DNA
gctctggccccgaccctgcgccttccgg

SEQ ID NO: 4708 - DNA, 28 bp, synthetic construct
  source 1..28: mol_type = other DNA
agggtcggggccagagcccctcgagagg

SEQ ID NO: 4709 - DNA, 28 bp, synthetic construct
  source 1..28: mol_type = other DNA
gtcggggccagagcccctcgagaggcgg

SEQ ID NO: 4710 - DNA, 28 bp, synthetic construct
  source 1..28: mol_type = other DNA
tcggggccagagcccctcgagaggcggg

SEQ ID NO: 4711 - DNA, 28 bp, synthetic construct
  source 1..28: mol_type = other DNA
ccagcacccgcctctcgaggggctctgg

SEQ ID NO: 4712 - DNA, 28 bp, synthetic construct
  source 1..28: mol_type = other DNA
ccagagcccctcgagaggcgggtgctgg

SEQ ID NO: 4713 - DNA, 28 bp, synthetic construct
  source 1..28: mol_type = other DNA
cagagcccctcgagaggcgggtgctggg

SEQ ID NO: 4714 - DNA, 28 bp, synthetic construct
  source 1..28: mol_type = other DNA
agagcccctcgagaggcgggtgctgggg

SEQ ID NO: 4715 - DNA, 28 bp, synthetic construct
  source 1..28: mol_type = other DNA
cctgccccagcacccgcctctcgagggg

SEQ ID NO: 4716 - DNA, 28 bp, synthetic construct
  source 1..28: mol_type = other DNA
cccctcgagaggcgggtgctggggcagg

SEQ ID NO: 4717 - DNA, 28 bp, synthetic construct
  source 1..28: mol_type = other DNA
acctgccccagcacccgcctctcgaggg

SEQ ID NO: 4718 - DNA, 28 bp, synthetic construct
  source 1..28: mol_type = other DNA
cacctgccccagcacccgcctctcgagg

SEQ ID NO: 4719 - DNA, 28 bp, synthetic construct
  source 1..28: mol_type = other DNA
ggcgggtgctggggcaggtgcgaacagg

SEQ ID NO: 4720 - DNA, 28 bp, synthetic construct
  source 1..28: mol_type = other DNA
gggtgctggggcaggtgcgaacaggcgg

SEQ ID NO: 4721 - DNA, 28 bp, synthetic construct
  source 1..28: mol_type = other DNA
ggtgctggggcaggtgcgaacaggcggg

SEQ ID NO: 4722 - DNA, 28 bp, synthetic construct
  source 1..28: mol_type = other DNA
ggggcaggtgcgaacaggcgggcagagg

SEQ ID NO: 4723 - DNA, 28 bp, synthetic construct
  source 1..28: mol_type = other DNA
gggcaggtgcgaacaggcgggcagaggg

SEQ ID NO: 4724 - DNA, 28 bp, synthetic construct
  source 1..28: mol_type = other DNA
gcgaacaggcgggcagagggccccgcgg

SEQ ID NO: 4725 - DNA, 28 bp, synthetic construct
  source 1..28: mol_type = other DNA
cgaacaggcgggcagagggccccgcggg

SEQ ID NO: 4726 - DNA, 28 bp, synthetic construct
  source 1..28: mol_type = other DNA
acaggcgggcagagggccccgcgggagg

SEQ ID NO: 4727 - DNA, 28 bp, synthetic construct
  source 1..28: mol_type = other DNA
caggcgggcagagggccccgcgggaggg

SEQ ID NO: 4728 - DNA, 28 bp, synthetic construct
  source 1..28: mol_type = other DNA
ggccccgcgggagggtccagaagagagg

SEQ ID NO: 4729 - DNA, 28 bp, synthetic construct
  source 1..28: mol_type = other DNA
gccccgcgggagggtccagaagagaggg

SEQ ID NO: 4730 - DNA, 28 bp, synthetic construct
  source 1..28: mol_type = other DNA
tccctctcttctggaccctcccgcgggg

SEQ ID NO: 4731 - DNA, 28 bp, synthetic construct
  source 1..28: mol_type = other DNA
ttccctctcttctggaccctcccgcggg

SEQ ID NO: 4732 - DNA, 28 bp, synthetic construct
  source 1..28: mol_type = other DNA
tttccctctcttctggaccctcccgcgg

SEQ ID NO: 4733 - DNA, 28 bp, synthetic construct
  source 1..28: mol_type = other DNA
gggagggtccagaagagagggaaacagg

SEQ ID NO: 4734 - DNA, 28 bp, synthetic construct
  source 1..28: mol_type = other DNA
ggagggtccagaagagagggaaacaggg

SEQ ID NO: 4735 - DNA, 28 bp, synthetic construct
  source 1..28: mol_type = other DNA
gcttcggccctgtttccctctcttctgg

SEQ ID NO: 4736 - DNA, 28 bp, synthetic construct
  source 1..28: mol_type = other DNA
agaagagagggaaacagggccgaagcgg

SEQ ID NO: 4737 - DNA, 28 bp, synthetic construct
  source 1..28: mol_type = other DNA
gaaacagggccgaagcggtcctcgccgg

SEQ ID NO: 4738 - DNA, 28 bp, synthetic construct
  source 1..28: mol_type = other DNA
cggtggcgtccggcgaggaccgcttcgg

SEQ ID NO: 4739 - DNA, 28 bp, synthetic construct
  source 1..28: mol_type = other DNA
aagcggtcctcgccggacgccaccgcgg

SEQ ID NO: 4740 - DNA, 28 bp, synthetic construct
  source 1..28: mol_type = other DNA
tctctttccgcggtggcgtccggcgagg

SEQ ID NO: 4741 - DNA, 28 bp, synthetic construct
  source 1..28: mol_type = other DNA
tggtttctctttccgcggtggcgtccgg

SEQ ID NO: 4742 - DNA, 28 bp, synthetic construct
  source 1..28: mol_type = other DNA
ccacttttggtttctctttccgcggtgg

SEQ ID NO: 4743 - DNA, 28 bp, synthetic construct
  source 1..28: mol_type = other DNA
ccaccgcggaaagagaaaccaaaagtgg

SEQ ID NO: 4744 - DNA, 28 bp, synthetic construct
  source 1..28: mol_type = other DNA
gctccacttttggtttctctttccgcgg

SEQ ID NO: 4745 - DNA, 28 bp, synthetic construct
  source 1..28: mol_type = other DNA
cggaaagagaaaccaaaagtggagctgg

SEQ ID NO: 4746 - DNA, 28 bp, synthetic construct
  source 1..28: mol_type = other DNA
ggaaagagaaaccaaaagtggagctggg

SEQ ID NO: 4747 - DNA, 28 bp, synthetic construct
  source 1..28: mol_type = other DNA
gaaagagaaaccaaaagtggagctgggg

SEQ ID NO: 4748 - DNA, 28 bp, synthetic construct
  source 1..28: mol_type = other DNA
aaagagaaaccaaaagtggagctggggg

SEQ ID NO: 4749 - DNA, 28 bp, synthetic construct
  source 1..28: mol_type = other DNA
gagaaaccaaaagtggagctgggggcgg

SEQ ID NO: 4750 - DNA, 28 bp, synthetic construct
  source 1..28: mol_type = other DNA
agaaaccaaaagtggagctgggggcggg

SEQ ID NO: 4751 - DNA, 28 bp, synthetic construct
  source 1..28: mol_type = other DNA
gaaaccaaaagtggagctgggggcgggg

SEQ ID NO: 4752 - DNA, 28 bp, synthetic construct
  source 1..28: mol_type = other DNA
ccggccccgcccccagctccacttttgg

SEQ ID NO: 4753 - DNA, 28 bp, synthetic construct
  source 1..28: mol_type = other DNA
ccaaaagtggagctgggggcggggccgg

SEQ ID NO: 4754 - DNA, 28 bp, synthetic construct
  source 1..28: mol_type = other DNA
aagtggagctgggggcggggccggcagg

SEQ ID NO: 4755 - DNA, 28 bp, synthetic construct
  source 1..28: mol_type = other DNA
agtggagctgggggcggggccggcaggg

SEQ ID NO: 4756 - DNA, 28 bp, synthetic construct
  source 1..28: mol_type = other DNA
gtggagctgggggcggggccggcagggg

SEQ ID NO: 4757 - DNA, 28 bp, synthetic construct
  source 1..28: mol_type = other DNA
tggagctgggggcggggccggcaggggg

SEQ ID NO: 4758 - DNA, 28 bp, synthetic construct
  source 1..28: mol_type = other DNA
agctgggggcggggccggcagggggcgg

SEQ ID NO: 4759 - DNA, 28 bp, synthetic construct
  source 1..28: mol_type = other DNA
gctgggggcggggccggcagggggcggg

SEQ ID NO: 4760 - DNA, 28 bp, synthetic construct
  source 1..28: mol_type = other DNA
ctgggggcggggccggcagggggcgggg

SEQ ID NO: 4761 - DNA, 28 bp, synthetic construct
  source 1..28: mol_type = other DNA
gacggcgggaggccccgccccctgccgg

SEQ ID NO: 4762 - DNA, 28 bp, synthetic construct
  source 1..28: mol_type = other DNA
cggaggcggggctggcgacggcgggagg

SEQ ID NO: 4763 - DNA, 28 bp, synthetic construct
  source 1..28: mol_type = other DNA
gctcggaggcggggctggcgacggcggg

SEQ ID NO: 4764 - DNA, 28 bp, synthetic construct
  source 1..28: mol_type = other DNA
ggctcggaggcggggctggcgacggcgg

SEQ ID NO: 4765 - DNA, 28 bp, synthetic construct
  source 1..28: mol_type = other DNA
gccgtcgccagccccgcctccgagccgg

SEQ ID NO: 4766 - DNA, 28 bp, synthetic construct
  source 1..28: mol_type = other DNA
accggctcggaggcggggctggcgacgg

SEQ ID NO: 4767 - DNA, 28 bp, synthetic construct
  source 1..28: mol_type = other DNA
ttttaaaccggctcggaggcggggctgg

SEQ ID NO: 4768 - DNA, 28 bp, synthetic construct
  source 1..28: mol_type = other DNA
agtcttttaaaccggctcggaggcgggg

SEQ ID NO: 4769 - DNA, 28 bp, synthetic construct
  source 1..28: mol_type = other DNA
cagtcttttaaaccggctcggaggcggg

SEQ ID NO: 4770 - DNA, 28 bp, synthetic construct
  source 1..28: mol_type = other DNA
ccagtcttttaaaccggctcggaggcgg

SEQ ID NO: 4771 - DNA, 28 bp, synthetic construct
  source 1..28: mol_type = other DNA
ccgcctccgagccggtttaaaagactgg

SEQ ID NO: 4772 - DNA, 28 bp, synthetic construct
  source 1..28: mol_type = other DNA
gcgccagtcttttaaaccggctcggagg

SEQ ID NO: 4773 - DNA, 28 bp, synthetic construct
  source 1..28: mol_type = other DNA
cctgcgccagtcttttaaaccggctcgg

SEQ ID NO: 4774 - DNA, 28 bp, synthetic construct
  source 1..28: mol_type = other DNA
ccgagccggtttaaaagactggcgcagg

SEQ ID NO: 4775 - DNA, 28 bp, synthetic construct
  source 1..28: mol_type = other DNA
cgagccggtttaaaagactggcgcaggg

SEQ ID NO: 4776 - DNA, 28 bp, synthetic construct
  source 1..28: mol_type = other DNA
gagccggtttaaaagactggcgcagggg

SEQ ID NO: 4777 - DNA, 28 bp, synthetic construct
  source 1..28: mol_type = other DNA
ccgcccctgcgccagtcttttaaaccgg

SEQ ID NO: 4778 - DNA, 28 bp, synthetic construct
  source 1..28: mol_type = other DNA
ccggtttaaaagactggcgcaggggcgg

SEQ ID NO: 4779 - DNA, 28 bp, synthetic construct
  source 1..28: mol_type = other DNA
cggtttaaaagactggcgcaggggcggg

SEQ ID NO: 4780 - DNA, 28 bp, synthetic construct
  source 1..28: mol_type = other DNA
ggcgggcgccgaacagagcgagctgcgg

SEQ ID NO: 4781 - DNA, 28 bp, synthetic construct
  source 1..28: mol_type = other DNA
cgccgaacagagcgagctgcggccgtgg

SEQ ID NO: 4782 - DNA, 28 bp, synthetic construct
  source 1..28: mol_type = other DNA
tgccacggccgcagctcgctctgttcgg

SEQ ID NO: 4783 - DNA, 28 bp, synthetic construct
  source 1..28: mol_type = other DNA
gcgagctgcggccgtggcagctgcacgg

SEQ ID NO: 4784 - DNA, 28 bp, synthetic construct
  source 1..28: mol_type = other DNA
gcggccgtggcagctgcacggctcctgg

SEQ ID NO: 4785 - DNA, 28 bp, synthetic construct
  source 1..28: mol_type = other DNA
ggggccaggagccgtgcagctgccacgg

SEQ ID NO: 4786 - DNA, 28 bp, synthetic construct
  source 1..28: mol_type = other DNA
gtggcagctgcacggctcctggccccgg

SEQ ID NO: 4787 - DNA, 28 bp, synthetic construct
  source 1..28: mol_type = other DNA
cggctctcgcgcatgctccggggccagg

SEQ ID NO: 4788 - DNA, 28 bp, synthetic construct
  source 1..28: mol_type = other DNA
cggggcggctctcgcgcatgctccgggg

SEQ ID NO: 4789 - DNA, 28 bp, synthetic construct
  source 1..28: mol_type = other DNA
ccggggcggctctcgcgcatgctccggg

SEQ ID NO: 4790 - DNA, 28 bp, synthetic construct
  source 1..28: mol_type = other DNA
cccggagcatgcgcgagagccgccccgg

SEQ ID NO: 4791 - DNA, 28 bp, synthetic construct
  source 1..28: mol_type = other DNA
tccggggcggctctcgcgcatgctccgg

SEQ ID NO: 4792 - DNA, 28 bp, synthetic construct
  source 1..28: mol_type = other DNA
gcgcgagagccgccccggagcgccccgg

SEQ ID NO: 4793 - DNA, 28 bp, synthetic construct
  source 1..28: mol_type = other DNA
cggggggctccggggcgctccggggcgg

SEQ ID NO: 4794 - DNA, 28 bp, synthetic construct
  source 1..28: mol_type = other DNA
cggcggggggctccggggcgctccgggg

SEQ ID NO: 4795 - DNA, 28 bp, synthetic construct
  source 1..28: mol_type = other DNA
acggcggggggctccggggcgctccggg

SEQ ID NO: 4796 - DNA, 28 bp, synthetic construct
  source 1..28: mol_type = other DNA
gacggcggggggctccggggcgctccgg

SEQ ID NO: 4797 - DNA, 28 bp, synthetic construct
  source 1..28: mol_type = other DNA
gcgggcgggacggcggggggctccgggg

SEQ ID NO: 4798 - DNA, 28 bp, synthetic construct
  source 1..28: mol_type = other DNA
cgcgggcgggacggcggggggctccggg

SEQ ID NO: 4799 - DNA, 28 bp, synthetic construct
  source 1..28: mol_type = other DNA
ccgcgggcgggacggcggggggctccgg

SEQ ID NO: 4800 - DNA, 28 bp, synthetic construct
  source 1..28: mol_type = other DNA
ccggagccccccgccgtcccgcccgcgg

SEQ ID NO: 4801 - DNA, 28 bp, synthetic construct
  source 1..28: mol_type = other DNA
gggacgccgcgggcgggacggcgggggg

SEQ ID NO: 4802 - DNA, 28 bp, synthetic construct
  source 1..28: mol_type = other DNA
cgggacgccgcgggcgggacggcggggg

SEQ ID NO: 4803 - DNA, 28 bp, synthetic construct
  source 1..28: mol_type = other DNA
gcgggacgccgcgggcgggacggcgggg

SEQ ID NO: 4804 - DNA, 28 bp, synthetic construct
  source 1..28: mol_type = other DNA
cgcgggacgccgcgggcgggacggcggg

SEQ ID NO: 4805 - DNA, 28 bp, synthetic construct
  source 1..28: mol_type = other DNA
gcgcgggacgccgcgggcgggacggcgg

SEQ ID NO: 4806 - DNA, 28 bp, synthetic construct
  source 1..28: mol_type = other DNA
ggggcgcgggacgccgcgggcgggacgg

SEQ ID NO: 4807 - DNA, 28 bp, synthetic construct
  source 1..28: mol_type = other DNA
cggcggggcgcgggacgccgcgggcggg

SEQ ID NO: 4808 - DNA, 28 bp, synthetic construct
  source 1..28: mol_type = other DNA
gcggcggggcgcgggacgccgcgggcgg

SEQ ID NO: 4809 - DNA, 28 bp, synthetic construct
  source 1..28: mol_type = other DNA
ctggcggcggggcgcgggacgccgcggg

SEQ ID NO: 4810 - DNA, 28 bp, synthetic construct
  source 1..28: mol_type = other DNA
cctggcggcggggcgcgggacgccgcgg

SEQ ID NO: 4811 - DNA, 28 bp, synthetic construct
  source 1..28: mol_type = other DNA
ccgcggcgtcccgcgccccgccgccagg

SEQ ID NO: 4812 - DNA, 28 bp, synthetic construct
  source 1..28: mol_type = other DNA
tcccgcgccccgccgccaggtgagccgg

SEQ ID NO: 4813 - DNA, 28 bp, synthetic construct
  source 1..28: mol_type = other DNA
cccggctcacctggcggcggggcgcggg

SEQ ID NO: 4814 - DNA, 28 bp, synthetic construct
  source 1..28: mol_type = other DNA
cccgcgccccgccgccaggtgagccggg

SEQ ID NO: 4815 - DNA, 28 bp, synthetic construct
  source 1..28: mol_type = other DNA
gcccggctcacctggcggcggggcgcgg

SEQ ID NO: 4816 - DNA, 28 bp, synthetic construct
  source 1..28: mol_type = other DNA
ccagggcccggctcacctggcggcgggg

SEQ ID NO: 4817 - DNA, 28 bp, synthetic construct
  source 1..28: mol_type = other DNA
ccccgccgccaggtgagccgggccctgg

SEQ ID NO: 4818 - DNA, 28 bp, synthetic construct
  source 1..28: mol_type = other DNA
cccagggcccggctcacctggcggcggg

SEQ ID NO: 4819 - DNA, 28 bp, synthetic construct
  source 1..28: mol_type = other DNA
cccgccgccaggtgagccgggccctggg

SEQ ID NO: 4820 - DNA, 28 bp, synthetic construct
  source 1..28: mol_type = other DNA
gcccagggcccggctcacctggcggcgg

SEQ ID NO: 4821 - DNA, 28 bp, synthetic construct
  source 1..28: mol_type = other DNA
ctcgcccagggcccggctcacctggcgg

SEQ ID NO: 4822 - DNA, 28 bp, synthetic construct
  source 1..28: mol_type = other DNA
cgccaggtgagccgggccctgggcgagg

SEQ ID NO: 4823 - DNA, 28 bp, synthetic construct
  source 1..28: mol_type = other DNA
ctcctcgcccagggcccggctcacctgg

SEQ ID NO: 4824 - DNA, 28 bp, synthetic construct
  source 1..28: mol_type = other DNA
caggtgagccgggccctgggcgaggagg

SEQ ID NO: 4825 - DNA, 28 bp, synthetic construct
  source 1..28: mol_type = other DNA
gtgagccgggccctgggcgaggaggcgg

SEQ ID NO: 4826 - DNA, 28 bp, synthetic construct
  source 1..28: mol_type = other DNA
tgagccgggccctgggcgaggaggcggg

SEQ ID NO: 4827 - DNA, 28 bp, synthetic construct
  source 1..28: mol_type = other DNA
gccgggccctgggcgaggaggcgggagg

SEQ ID NO: 4828 - DNA, 28 bp, synthetic construct
  source 1..28: mol_type = other DNA
ccctcccgcctcctcgcccagggcccgg

SEQ ID NO: 4829 - DNA, 28 bp, synthetic construct
  source 1..28: mol_type = other DNA
ccgggccctgggcgaggaggcgggaggg

SEQ ID NO: 4830 - DNA, 28 bp, synthetic construct
  source 1..28: mol_type = other DNA
ggccctgggcgaggaggcgggagggagg

SEQ ID NO: 4831 - DNA, 28 bp, synthetic construct
  source 1..28: mol_type = other DNA
ctcctccctcccgcctcctcgcccaggg

SEQ ID NO: 4832 - DNA, 28 bp, synthetic construct
  source 1..28: mol_type = other DNA
cctcctccctcccgcctcctcgcccagg

SEQ ID NO: 4833 - DNA, 28 bp, synthetic construct
  source 1..28: mol_type = other DNA
cctgggcgaggaggcgggagggaggagg

SEQ ID NO: 4834 - DNA, 28 bp, synthetic construct
  source 1..28: mol_type = other DNA
ctgggcgaggaggcgggagggaggaggg

SEQ ID NO: 4835 - DNA, 28 bp, synthetic construct
  source 1..28: mol_type = other DNA
ggcgaggaggcgggagggaggagggagg

SEQ ID NO: 4836 - DNA, 28 bp, synthetic construct
  source 1..28: mol_type = other DNA
gcgaggaggcgggagggaggagggaggg

SEQ ID NO: 4837 - DNA, 28 bp, synthetic construct
  source 1..28: mol_type = other DNA
cgaggaggcgggagggaggagggagggg

SEQ ID NO: 4838 - DNA, 28 bp, synthetic construct
  source 1..28: mol_type = other DNA
cgggagggaggagggaggggagtccagg

SEQ ID NO: 4839 - DNA, 28 bp, synthetic construct
  source 1..28: mol_type = other DNA
gggagggaggagggaggggagtccaggg

SEQ ID NO: 4840 - DNA, 28 bp, synthetic construct
  source 1..28: mol_type = other DNA
ggagggaggggagtccagggcagccagg

SEQ ID NO: 4841 - DNA, 28 bp, synthetic construct
  source 1..28: mol_type = other DNA
aggggagtccagggcagccaggagtcgg

SEQ ID NO: 4842 - DNA, 28 bp, synthetic construct
  source 1..28: mol_type = other DNA
ggggagtccagggcagccaggagtcggg

SEQ ID NO: 4843 - DNA, 28 bp, synthetic construct
  source 1..28: mol_type = other DNA
aggctcgcccgactcctggctgccctgg

SEQ ID NO: 4844 - DNA, 28 bp, synthetic construct
  source 1..28: mol_type = other DNA
gggcagccaggagtcgggcgagcctcgg

SEQ ID NO: 4845 - DNA, 28 bp, synthetic construct
  source 1..28: mol_type = other DNA
ggcagccaggagtcgggcgagcctcggg

SEQ ID NO: 4846 - DNA, 28 bp, synthetic construct
  source 1..28: mol_type = other DNA
gcagccaggagtcgggcgagcctcgggg

SEQ ID NO: 4847 - DNA, 28 bp, synthetic construct
  source 1..28: mol_type = other DNA
cagccaggagtcgggcgagcctcggggg

SEQ ID NO: 4848 - DNA, 28 bp, synthetic construct
  source 1..28: mol_type = other DNA
cagcccccgaggctcgcccgactcctgg

SEQ ID NO: 4849 - DNA, 28 bp, synthetic construct
  source 1..28: mol_type = other DNA
cgggcgagcctcgggggctgcagaatgg

SEQ ID NO: 4850 - DNA, 28 bp, synthetic construct
  source 1..28: mol_type = other DNA
gggcgagcctcgggggctgcagaatggg

SEQ ID NO: 4851 - DNA, 28 bp, synthetic construct
  source 1..28: mol_type = other DNA
ggcgagcctcgggggctgcagaatgggg

SEQ ID NO: 4852 - DNA, 28 bp, synthetic construct
  source 1..28: mol_type = other DNA
ccgcgaccccattctgcagcccccgagg

SEQ ID NO: 4853 - DNA, 28 bp, synthetic construct
  source 1..28: mol_type = other DNA
cctcgggggctgcagaatggggtcgcgg

SEQ ID NO: 4854 - DNA, 28 bp, synthetic construct
  source 1..28: mol_type = other DNA
cggccgcgatgcccctgaccctcgccgg

SEQ ID NO: 4855 - DNA, 28 bp, synthetic construct
  source 1..28: mol_type = other DNA
gggccggcgagggtcaggggcatcgcgg

SEQ ID NO: 4856 - DNA, 28 bp, synthetic construct
  source 1..28: mol_type = other DNA
cctgggtggggccggcgagggtcagggg

SEQ ID NO: 4857 - DNA, 28 bp, synthetic construct
  source 1..28: mol_type = other DNA
cccctgaccctcgccggccccacccagg

SEQ ID NO: 4858 - DNA, 28 bp, synthetic construct
  source 1..28: mol_type = other DNA
gcctgggtggggccggcgagggtcaggg

SEQ ID NO: 4859 - DNA, 28 bp, synthetic construct
  source 1..28: mol_type = other DNA
ggcctgggtggggccggcgagggtcagg

SEQ ID NO: 4860 - DNA, 28 bp, synthetic construct
  source 1..28: mol_type = other DNA
ggggcggcctgggtggggccggcgaggg

SEQ ID NO: 4861 - DNA, 28 bp, synthetic construct
  source 1..28: mol_type = other DNA
gggggcggcctgggtggggccggcgagg

SEQ ID NO: 4862 - DNA, 28 bp, synthetic construct
  source 1..28: mol_type = other DNA
gcgcggggggcggcctgggtggggccgg

SEQ ID NO: 4863 - DNA, 28 bp, synthetic construct
  source 1..28: mol_type = other DNA
ccgcgcgcggggggcggcctgggtgggg

SEQ ID NO: 4864 - DNA, 28 bp, synthetic construct
  source 1..28: mol_type = other DNA
ccccacccaggccgccccccgcgcgcgg

SEQ ID NO: 4865 - DNA, 28 bp, synthetic construct
  source 1..28: mol_type = other DNA
cccgcgcgcggggggcggcctgggtggg

SEQ ID NO: 4866 - DNA, 28 bp, synthetic construct
  source 1..28: mol_type = other DNA
cccacccaggccgccccccgcgcgcggg

SEQ ID NO: 4867 - DNA, 28 bp, synthetic construct
  source 1..28: mol_type = other DNA
ccccgcgcgcggggggcggcctgggtgg

SEQ ID NO: 4868 - DNA, 28 bp, synthetic construct
  source 1..28: mol_type = other DNA
ccacccaggccgccccccgcgcgcgggg

SEQ ID NO: 4869 - DNA, 28 bp, synthetic construct
  source 1..28: mol_type = other DNA
gagccccgcgcgcggggggcggcctggg

SEQ ID NO: 4870 - DNA, 28 bp, synthetic construct
  source 1..28: mol_type = other DNA
ggagccccgcgcgcggggggcggcctgg

SEQ ID NO: 4871 - DNA, 28 bp, synthetic construct
  source 1..28: mol_type = other DNA
ctgcgggagccccgcgcgcggggggcgg

SEQ ID NO: 4872 - DNA, 28 bp, synthetic construct
  source 1..28: mol_type = other DNA
gtgctgcgggagccccgcgcgcgggggg

SEQ ID NO: 4873 - DNA, 28 bp, synthetic construct
  source 1..28: mol_type = other DNA
tgtgctgcgggagccccgcgcgcggggg

SEQ ID NO: 4874 - DNA, 28 bp, synthetic construct
  source 1..28: mol_type = other DNA
ctgtgctgcgggagccccgcgcgcgggg

SEQ ID NO: 4875 - DNA, 28 bp, synthetic construct
  source 1..28: mol_type = other DNA
gctgtgctgcgggagccccgcgcgcggg

SEQ ID NO: 4876 - DNA, 28 bp, synthetic construct
  source 1..28: mol_type = other DNA
ggctgtgctgcgggagccccgcgcgcgg

SEQ ID NO: 4877 - DNA, 28 bp, synthetic construct
  source 1..28: mol_type = other DNA
gggctcccgcagcacagcctttctccgg

SEQ ID NO: 4878 - DNA, 28 bp, synthetic construct
  source 1..28: mol_type = other DNA
tagggccggagaaaggctgtgctgcggg

SEQ ID NO: 4879 - DNA, 28 bp, synthetic construct
  source 1..28: mol_type = other DNA
ctagggccggagaaaggctgtgctgcgg

SEQ ID NO: 4880 - DNA, 28 bp, synthetic construct
  source 1..28: mol_type = other DNA
ggcgatttgggctagggccggagaaagg

SEQ ID NO: 4881 - DNA, 28 bp, synthetic construct
  source 1..28: mol_type = other DNA
tggtctgggcgatttgggctagggccgg

SEQ ID NO: 4882 - DNA, 28 bp, synthetic construct
  source 1..28: mol_type = other DNA
ggccctagcccaaatcgcccagaccagg

SEQ ID NO: 4883 - DNA, 28 bp, synthetic construct
  source 1..28: mol_type = other DNA
cgcctggtctgggcgatttgggctaggg

SEQ ID NO: 4884 - DNA, 28 bp, synthetic construct
  source 1..28: mol_type = other DNA
gcgcctggtctgggcgatttgggctagg

SEQ ID NO: 4885 - DNA, 28 bp, synthetic construct
  source 1..28: mol_type = other DNA
tagcccaaatcgcccagaccaggcgcgg

SEQ ID NO: 4886 - DNA, 28 bp, synthetic construct
  source 1..28: mol_type = other DNA
gatccgcgcctggtctgggcgatttggg

SEQ ID NO: 4887 - DNA, 28 bp, synthetic construct
  source 1..28: mol_type = other DNA
ggatccgcgcctggtctgggcgatttgg

SEQ ID NO: 4888 - DNA, 28 bp, synthetic construct
  source 1..28: mol_type = other DNA
ccaggctgggatccgcgcctggtctggg

SEQ ID NO: 4889 - DNA, 28 bp, synthetic construct
  source 1..28: mol_type = other DNA
cccagaccaggcgcggatcccagcctgg

SEQ ID NO: 4890 - DNA, 28 bp, synthetic construct
  source 1..28: mol_type = other DNA
gccaggctgggatccgcgcctggtctgg

SEQ ID NO: 4891 - DNA, 28 bp, synthetic construct
  source 1..28: mol_type = other DNA
tgctggccaggctgggatccgcgcctgg

SEQ ID NO: 4892 - DNA, 28 bp, synthetic construct
  source 1..28: mol_type = other DNA
aggcgcggatcccagcctggccagcagg

SEQ ID NO: 4893 - DNA, 28 bp, synthetic construct
  source 1..28: mol_type = other DNA
cgcggatcccagcctggccagcaggcgg

SEQ ID NO: 4894 - DNA, 28 bp, synthetic construct
  source 1..28: mol_type = other DNA
ggatcccagcctggccagcaggcggcgg

SEQ ID NO: 4895 - DNA, 28 bp, synthetic construct
  source 1..28: mol_type = other DNA
gatcccagcctggccagcaggcggcggg

SEQ ID NO: 4896 - DNA, 28 bp, synthetic construct
  source 1..28: mol_type = other DNA
gcgcccgccgcctgctggccaggctggg

SEQ ID NO: 4897 - DNA, 28 bp, synthetic construct
  source 1..28: mol_type = other DNA
cgcgcccgccgcctgctggccaggctgg

SEQ ID NO: 4898 - DNA, 28 bp, synthetic construct
  source 1..28: mol_type = other DNA
cagcctggccagcaggcggcgggcgcgg

SEQ ID NO: 4899 - DNA, 28 bp, synthetic construct
  source 1..28: mol_type = other DNA
agcctggccagcaggcggcgggcgcggg

SEQ ID NO: 4900 - DNA, 28 bp, synthetic construct
  source 1..28: mol_type = other DNA
gcctggccagcaggcggcgggcgcgggg

SEQ ID NO: 4901 - DNA, 28 bp, synthetic construct
  source 1..28: mol_type = other DNA
gccccgcgcccgccgcctgctggccagg

SEQ ID NO: 4902 - DNA, 28 bp, synthetic construct
  source 1..28: mol_type = other DNA
tggccagcaggcggcgggcgcggggcgg

SEQ ID NO: 4903 - DNA, 28 bp, synthetic construct
  source 1..28: mol_type = other DNA
tcgccgccccgcgcccgccgcctgctgg

SEQ ID NO: 4904 - DNA, 28 bp, synthetic construct
  source 1..28: mol_type = other DNA
aggcggcgggcgcggggcggcgagccgg

SEQ ID NO: 4905 - DNA, 28 bp, synthetic construct
  source 1..28: mol_type = other DNA
ggcggcgggcgcggggcggcgagccggg

SEQ ID NO: 4906 - DNA, 28 bp, synthetic construct
  source 1..28: mol_type = other DNA
gcggcgggcgcggggcggcgagccgggg

SEQ ID NO: 4907 - DNA, 28 bp, synthetic construct
  source 1..28: mol_type = other DNA
cgggcgcggggcggcgagccggggccgg

SEQ ID NO: 4908 - DNA, 28 bp, synthetic construct
  source 1..28: mol_type = other DNA
cgcggggcggcgagccggggccggacgg

SEQ ID NO: 4909 - DNA, 28 bp, synthetic construct
  source 1..28: mol_type = other DNA
gggcggcgagccggggccggacggctgg

SEQ ID NO: 4910 - DNA, 28 bp, synthetic construct
  source 1..28: mol_type = other DNA
ggttctggctccagccgtccggccccgg

SEQ ID NO: 4911 - DNA, 28 bp, synthetic construct
  source 1..28: mol_type = other DNA
ggggccggacggctggagccagaaccgg

SEQ ID NO: 4912 - DNA, 28 bp, synthetic construct
  source 1..28: mol_type = other DNA
gcagccggttctggctccagccgtccgg

SEQ ID NO: 4913 - DNA, 28 bp, synthetic construct
  source 1..28: mol_type = other DNA
ggggggcgtggagagcagccggttctgg

SEQ ID NO: 4914 - DNA, 28 bp, synthetic construct
  source 1..28: mol_type = other DNA
ccgagaggggggcgtggagagcagccgg

SEQ ID NO: 4915 - DNA, 28 bp, synthetic construct
  source 1..28: mol_type = other DNA
ccggctgctctccacgcccccctctcgg

SEQ ID NO: 4916 - DNA, 28 bp, synthetic construct
  source 1..28: mol_type = other DNA
tccacgcccccctctcggtgctgcccgg

SEQ ID NO: 4917 - DNA, 28 bp, synthetic construct
  source 1..28: mol_type = other DNA
tccgggcagcaccgagaggggggcgtgg

SEQ ID NO: 4918 - DNA, 28 bp, synthetic construct
  source 1..28: mol_type = other DNA
acgcccccctctcggtgctgcccggagg

SEQ ID NO: 4919 - DNA, 28 bp, synthetic construct
  source 1..28: mol_type = other DNA
cggcctccgggcagcaccgagagggggg

SEQ ID NO: 4920 - DNA, 28 bp, synthetic construct
  source 1..28: mol_type = other DNA
ccggcctccgggcagcaccgagaggggg

SEQ ID NO: 4921 - DNA, 28 bp, synthetic construct
  source 1..28: mol_type = other DNA
ccccctctcggtgctgcccggaggccgg

SEQ ID NO: 4922 - DNA, 28 bp, synthetic construct
  source 1..28: mol_type = other DNA
tccggcctccgggcagcaccgagagggg

SEQ ID NO: 4923 - DNA, 28 bp, synthetic construct
  source 1..28: mol_type = other DNA
gtccggcctccgggcagcaccgagaggg

SEQ ID NO: 4924 - DNA, 28 bp, synthetic construct
  source 1..28: mol_type = other DNA
agtccggcctccgggcagcaccgagagg

SEQ ID NO: 4925 - DNA, 28 bp, synthetic construct
  source 1..28: mol_type = other DNA
tcggtggaggcggagtccggcctccggg

SEQ ID NO: 4926 - DNA, 28 bp, synthetic construct
  source 1..28: mol_type = other DNA
ctcggtggaggcggagtccggcctccgg

SEQ ID NO: 4927 - DNA, 28 bp, synthetic construct
  source 1..28: mol_type = other DNA
gtgggggctcggtggaggcggagtccgg

SEQ ID NO: 4928 - DNA, 28 bp, synthetic construct
  source 1..28: mol_type = other DNA
ccggcgggtgggggctcggtggaggcgg

SEQ ID NO: 4929 - DNA, 28 bp, synthetic construct
  source 1..28: mol_type = other DNA
ccgcctccaccgagcccccacccgccgg

SEQ ID NO: 4930 - DNA, 28 bp, synthetic construct
  source 1..28: mol_type = other DNA
cgcctccaccgagcccccacccgccggg

SEQ ID NO: 4931 - DNA, 28 bp, synthetic construct
  source 1..28: mol_type = other DNA
ttcccggcgggtgggggctcggtggagg

SEQ ID NO: 4932 - DNA, 28 bp, synthetic construct
  source 1..28: mol_type = other DNA
ctcttcccggcgggtgggggctcggtgg

SEQ ID NO: 4933 - DNA, 28 bp, synthetic construct
  source 1..28: mol_type = other DNA
gagctcttcccggcgggtgggggctcgg

SEQ ID NO: 4934 - DNA, 28 bp, synthetic construct
  source 1..28: mol_type = other DNA
ccgcggagctcttcccggcgggtggggg

SEQ ID NO: 4935 - DNA, 28 bp, synthetic construct
  source 1..28: mol_type = other DNA
cccccacccgccgggaagagctccgcgg

SEQ ID NO: 4936 - DNA, 28 bp, synthetic construct
  source 1..28: mol_type = other DNA
tccgcggagctcttcccggcgggtgggg

SEQ ID NO: 4937 - DNA, 28 bp, synthetic construct
  source 1..28: mol_type = other DNA
ctccgcggagctcttcccggcgggtggg

SEQ ID NO: 4938 - DNA, 28 bp, synthetic construct
  source 1..28: mol_type = other DNA
actccgcggagctcttcccggcgggtgg

SEQ ID NO: 4939 - DNA, 28 bp, synthetic construct
  source 1..28: mol_type = other DNA
tgtactccgcggagctcttcccggcggg

SEQ ID NO: 4940 - DNA, 28 bp, synthetic construct
  source 1..28: mol_type = other DNA
ctgtactccgcggagctcttcccggcgg

SEQ ID NO: 4941 - DNA, 28 bp, synthetic construct
  source 1..28: mol_type = other DNA
gctctgtactccgcggagctcttcccgg

SEQ ID NO: 4942 - DNA, 28 bp, synthetic construct
  source 1..28: mol_type = other DNA
gctagaaaatgggctctgtactccgcgg

SEQ ID NO: 4943 - DNA, 28 bp, synthetic construct
  source 1..28: mol_type = other DNA
gcccattttctagctgtgtccactgagg

SEQ ID NO: 4944 - DNA, 28 bp, synthetic construct
  source 1..28: mol_type = other DNA
gcctcagtggacacagctagaaaatggg

SEQ ID NO: 4945 - DNA, 28 bp, synthetic construct
  source 1..28: mol_type = other DNA
agcctcagtggacacagctagaaaatgg

SEQ ID NO: 4946 - DNA, 28 bp, synthetic construct
  source 1..28: mol_type = other DNA
tctagctgtgtccactgaggctgaacgg

SEQ ID NO: 4947 - DNA, 28 bp, synthetic construct
  source 1..28: mol_type = other DNA
tccactgaggctgaacggatccgcgcgg

SEQ ID NO: 4948 - DNA, 28 bp, synthetic construct
  source 1..28: mol_type = other DNA
tccgcgcggatccgttcagcctcagtgg

SEQ ID NO: 4949 - DNA, 28 bp, synthetic construct
  source 1..28: mol_type = other DNA
gaggctgaacggatccgcgcggacttgg

SEQ ID NO: 4950 - DNA, 28 bp, synthetic construct
  source 1..28: mol_type = other DNA
gcgagcacggagcaccaagtccgcgcgg

SEQ ID NO: 4951 - DNA, 28 bp, synthetic construct
  source 1..28: mol_type = other DNA
acttggtgctccgtgctcgccccctagg

SEQ ID NO: 4952 - DNA, 28 bp, synthetic construct
  source 1..28: mol_type = other DNA
cttggtgctccgtgctcgccccctaggg

SEQ ID NO: 4953 - DNA, 28 bp, synthetic construct
  source 1..28: mol_type = other DNA
gtgctccgtgctcgccccctagggccgg

SEQ ID NO: 4954 - DNA, 28 bp, synthetic construct
  source 1..28: mol_type = other DNA
tgctccgtgctcgccccctagggccggg

SEQ ID NO: 4955 - DNA, 28 bp, synthetic construct
  source 1..28: mol_type = other DNA
cggacccggccctagggggcgagcacgg

SEQ ID NO: 4956 - DNA, 28 bp, synthetic construct
  source 1..28: mol_type = other DNA
gctcgccccctagggccgggtccgccgg

SEQ ID NO: 4957 - DNA, 28 bp, synthetic construct
  source 1..28: mol_type = other DNA
ctcgccccctagggccgggtccgccggg

SEQ ID NO: 4958 - DNA, 28 bp, synthetic construct
  source 1..28: mol_type = other DNA
cgctcccggcggacccggccctaggggg

SEQ ID NO: 4959 - DNA, 28 bp, synthetic construct
  source 1..28: mol_type = other DNA
gcgctcccggcggacccggccctagggg

SEQ ID NO: 4960 - DNA, 28 bp, synthetic construct
  source 1..28: mol_type = other DNA
ggcgctcccggcggacccggccctaggg

SEQ ID NO: 4961 - DNA, 28 bp, synthetic construct
  source 1..28: mol_type = other DNA
cggcgctcccggcggacccggccctagg

SEQ ID NO: 4962 - DNA, 28 bp, synthetic construct
  source 1..28: mol_type = other DNA
cggagggcggcgctcccggcggacccgg

SEQ ID NO: 4963 - DNA, 28 bp, synthetic construct
  source 1..28: mol_type = other DNA
cgggtccgccgggagcgccgccctccgg

SEQ ID NO: 4964 - DNA, 28 bp, synthetic construct
  source 1..28: mol_type = other DNA
caactccggagggcggcgctcccggcgg

SEQ ID NO: 4965 - DNA, 28 bp, synthetic construct
  source 1..28: mol_type = other DNA
ggacaactccggagggcggcgctcccgg

SEQ ID NO: 4966 - DNA, 28 bp, synthetic construct
  source 1..28: mol_type = other DNA
gggagcgccgccctccggagttgtccgg

SEQ ID NO: 4967 - DNA, 28 bp, synthetic construct
  source 1..28: mol_type = other DNA
gcgccgccctccggagttgtccggccgg

SEQ ID NO: 4968 - DNA, 28 bp, synthetic construct
  source 1..28: mol_type = other DNA
gcgccggccggacaactccggagggcgg

SEQ ID NO: 4969 - DNA, 28 bp, synthetic construct
  source 1..28: mol_type = other DNA
tgtgcgccggccggacaactccggaggg

SEQ ID NO: 4970 - DNA, 28 bp, synthetic construct
  source 1..28: mol_type = other DNA
gtgtgcgccggccggacaactccggagg

SEQ ID NO: 4971 - DNA, 28 bp, synthetic construct
  source 1..28: mol_type = other DNA
caggtgtgcgccggccggacaactccgg

SEQ ID NO: 4972 - DNA, 28 bp, synthetic construct
  source 1..28: mol_type = other DNA
gttgtccggccggcgcacacctgcccgg

SEQ ID NO: 4973 - DNA, 28 bp, synthetic construct
  source 1..28: mol_type = other DNA
cggggccgggcaggtgtgcgccggccgg

SEQ ID NO: 4974 - DNA, 28 bp, synthetic construct
  source 1..28: mol_type = other DNA
gctgcggggccgggcaggtgtgcgccgg

SEQ ID NO: 4975 - DNA, 28 bp, synthetic construct
  source 1..28: mol_type = other DNA
gagctggggcgctgcggggccgggcagg

SEQ ID NO: 4976 - DNA, 28 bp, synthetic construct
  source 1..28: mol_type = other DNA
aggtgagctggggcgctgcggggccggg

SEQ ID NO: 4977 - DNA, 28 bp, synthetic construct
  source 1..28: mol_type = other DNA
gaggtgagctggggcgctgcggggccgg

SEQ ID NO: 4978 - DNA, 28 bp, synthetic construct
  source 1..28: mol_type = other DNA
caaagaggtgagctggggcgctgcgggg

SEQ ID NO: 4979 - DNA, 28 bp, synthetic construct
  source 1..28: mol_type = other DNA
acaaagaggtgagctggggcgctgcggg

SEQ ID NO: 4980 - DNA, 28 bp, synthetic construct
  source 1..28: mol_type = other DNA
gacaaagaggtgagctggggcgctgcgg

SEQ ID NO: 4981 - DNA, 28 bp, synthetic construct
  source 1..28: mol_type = other DNA
gcgggagagacaaagaggtgagctgggg

SEQ ID NO: 4982 - DNA, 28 bp, synthetic construct
  source 1..28: mol_type = other DNA
tgcgggagagacaaagaggtgagctggg

SEQ ID NO: 4983 - DNA, 28 bp, synthetic construct
  source 1..28: mol_type = other DNA
ctgcgggagagacaaagaggtgagctgg

SEQ ID NO: 4984 - DNA, 28 bp, synthetic construct
  source 1..28: mol_type = other DNA
ggggtgcgctgcgggagagacaaagagg

SEQ ID NO: 4985 - DNA, 28 bp, synthetic construct
  source 1..28: mol_type = other DNA
ctttgtctctcccgcagcgcacccccgg

SEQ ID NO: 4986 - DNA, 28 bp, synthetic construct
  source 1..28: mol_type = other DNA
tcccgcagcgcacccccggacgctatgg

SEQ ID NO: 4987 - DNA, 28 bp, synthetic construct
  source 1..28: mol_type = other DNA
gccatagcgtccgggggtgcgctgcggg

SEQ ID NO: 4988 - DNA, 28 bp, synthetic construct
  source 1..28: mol_type = other DNA
ggccatagcgtccgggggtgcgctgcgg

SEQ ID NO: 4989 - DNA, 28 bp, synthetic construct
  source 1..28: mol_type = other DNA
cggaggggtgggccatagcgtccggggg

SEQ ID NO: 4990 - DNA, 28 bp, synthetic construct
  source 1..28: mol_type = other DNA
ccggaggggtgggccatagcgtccgggg

SEQ ID NO: 4991 - DNA, 28 bp, synthetic construct
  source 1..28: mol_type = other DNA
ccccggacgctatggcccacccctccgg

SEQ ID NO: 4992 - DNA, 28 bp, synthetic construct
  source 1..28: mol_type = other DNA
gccggaggggtgggccatagcgtccggg

SEQ ID NO: 4993 - DNA, 28 bp, synthetic construct
  source 1..28: mol_type = other DNA
agccggaggggtgggccatagcgtccgg

SEQ ID NO: 4994 - DNA, 28 bp, synthetic construct
  source 1..28: mol_type = other DNA
ggacgctatggcccacccctccggctgg

SEQ ID NO: 4995 - DNA, 28 bp, synthetic construct
  source 1..28: mol_type = other DNA
tacagaaggggccagccggaggggtggg

SEQ ID NO: 4996 - DNA, 28 bp, synthetic construct
  source 1..28: mol_type = other DNA
ctacagaaggggccagccggaggggtgg

SEQ ID NO: 4997 - DNA, 28 bp, synthetic construct
  source 1..28: mol_type = other DNA
cacccctccggctggccccttctgtagg

SEQ ID NO: 4998 - DNA, 28 bp, synthetic construct
  source 1..28: mol_type = other DNA
atcctacagaaggggccagccggagggg

SEQ ID NO: 4999 - DNA, 28 bp, synthetic construct
  source 1..28: mol_type = other DNA
catcctacagaaggggccagccggaggg

SEQ ID NO: 5000 - DNA, 28 bp, synthetic construct
  source 1..28: mol_type = other DNA
ccatcctacagaaggggccagccggagg

SEQ ID NO: 5001 - DNA, 28 bp, synthetic construct
  source 1..28: mol_type = other DNA
cctccggctggccccttctgtaggatgg

SEQ ID NO: 5002 - DNA, 28 bp, synthetic construct
  source 1..28: mol_type = other DNA
cgcccgccgtgcacgcagcattaactgg

SEQ ID NO: 5003 - DNA, 28 bp, synthetic construct
  source 1..28: mol_type = other DNA
gcccgccgtgcacgcagcattaactggg

SEQ ID NO: 5004 - DNA, 28 bp, synthetic construct
  source 1..28: mol_type = other DNA
tcccagttaatgctgcgtgcacggcggg

SEQ ID NO: 5005 - DNA, 28 bp, synthetic construct
  source 1..28: mol_type = other DNA
atcccagttaatgctgcgtgcacggcgg

SEQ ID NO: 5006 - DNA, 28 bp, synthetic construct
  source 1..28: mol_type = other DNA
ggcatcccagttaatgctgcgtgcacgg

SEQ ID NO: 5007 - DNA, 28 bp, synthetic construct
  source 1..28: mol_type = other DNA
ccaggcaagtaataacaaaataacacgg

SEQ ID NO: 5008 - DNA, 28 bp, synthetic construct
  source 1..28: mol_type = other DNA
ccgtgttattttgttattacttgcctgg

SEQ ID NO: 5009 - DNA, 28 bp, synthetic construct
  source 1..28: mol_type = other DNA
ttgttattacttgcctggaaccatgtgg

SEQ ID NO: 5010 - DNA, 28 bp, synthetic construct
  source 1..28: mol_type = other DNA
tgttattacttgcctggaaccatgtggg

SEQ ID NO: 5011 - DNA, 28 bp, synthetic construct
  source 1..28: mol_type = other DNA
ccggggagggtacccacatggttccagg

SEQ ID NO: 5012 - DNA, 28 bp, synthetic construct
  source 1..28: mol_type = other DNA
cctggaaccatgtgggtaccctccccgg

SEQ ID NO: 5013 - DNA, 28 bp, synthetic construct
  source 1..28: mol_type = other DNA
aaccatgtgggtaccctccccggcctgg

SEQ ID NO: 5014 - DNA, 28 bp, synthetic construct
  source 1..28: mol_type = other DNA
accatgtgggtaccctccccggcctggg

SEQ ID NO: 5015 - DNA, 28 bp, synthetic construct
  source 1..28: mol_type = other DNA
acccaggccggggagggtacccacatgg

SEQ ID NO: 5016 - DNA, 28 bp, synthetic construct
  source 1..28: mol_type = other DNA
tgtgggtaccctccccggcctgggttgg

SEQ ID NO: 5017 - DNA, 28 bp, synthetic construct
  source 1..28: mol_type = other DNA
gggtaccctccccggcctgggttggagg

SEQ ID NO: 5018 - DNA, 28 bp, synthetic construct
  source 1..28: mol_type = other DNA
ggtaccctccccggcctgggttggaggg

SEQ ID NO: 5019 - DNA, 28 bp, synthetic construct
  source 1..28: mol_type = other DNA
cgctccctccaacccaggccggggaggg

SEQ ID NO: 5020 - DNA, 28 bp, synthetic construct
  source 1..28: mol_type = other DNA
ccgctccctccaacccaggccggggagg

SEQ ID NO: 5021 - DNA, 28 bp, synthetic construct
  source 1..28: mol_type = other DNA
cctccccggcctgggttggagggagcgg

SEQ ID NO: 5022 - DNA, 28 bp, synthetic construct
  source 1..28: mol_type = other DNA
catccgctccctccaacccaggccgggg

SEQ ID NO: 5023 - DNA, 28 bp, synthetic construct
  source 1..28: mol_type = other DNA
ccatccgctccctccaacccaggccggg

SEQ ID NO: 5024 - DNA, 28 bp, synthetic construct
  source 1..28: mol_type = other DNA
cccggcctgggttggagggagcggatgg

SEQ ID NO: 5025 - DNA, 28 bp, synthetic construct
  source 1..28: mol_type = other DNA
cccatccgctccctccaacccaggccgg

SEQ ID NO: 5026 - DNA, 28 bp, synthetic construct
  source 1..28: mol_type = other DNA
ccggcctgggttggagggagcggatggg

SEQ ID NO: 5027 - DNA, 28 bp, synthetic construct
  source 1..28: mol_type = other DNA
tacacccatccgctccctccaacccagg

SEQ ID NO: 5028 - DNA, 28 bp, synthetic construct
  source 1..28: mol_type = other DNA
tgggttggagggagcggatgggtgtagg

SEQ ID NO: 5029 - DNA, 28 bp, synthetic construct
  source 1..28: mol_type = other DNA
gggttggagggagcggatgggtgtaggg

SEQ ID NO: 5030 - DNA, 28 bp, synthetic construct
  source 1..28: mol_type = other DNA
ggttggagggagcggatgggtgtagggg

SEQ ID NO: 5031 - DNA, 28 bp, synthetic construct
  source 1..28: mol_type = other DNA
gagggagcggatgggtgtaggggcgagg

SEQ ID NO: 5032 - DNA, 28 bp, synthetic construct
  source 1..28: mol_type = other DNA
gtaggggcgaggcgcctcccgccctcgg

SEQ ID NO: 5033 - DNA, 28 bp, synthetic construct
  source 1..28: mol_type = other DNA
gggcgaggcgcctcccgccctcggctgg

SEQ ID NO: 5034 - DNA, 28 bp, synthetic construct
  source 1..28: mol_type = other DNA
cgcctcccgccctcggctggagacgagg

SEQ ID NO: 5035 - DNA, 28 bp, synthetic construct
  source 1..28: mol_type = other DNA
ggcctcgtctccagccgagggcgggagg

SEQ ID NO: 5036 - DNA, 28 bp, synthetic construct
  source 1..28: mol_type = other DNA
tgcggcctcgtctccagccgagggcggg

SEQ ID NO: 5037 - DNA, 28 bp, synthetic construct
  source 1..28: mol_type = other DNA
ctgcggcctcgtctccagccgagggcgg

SEQ ID NO: 5038 - DNA, 28 bp, synthetic construct
  source 1..28: mol_type = other DNA
ggtctgcggcctcgtctccagccgaggg

SEQ ID NO: 5039 - DNA, 28 bp, synthetic construct
  source 1..28: mol_type = other DNA
gggtctgcggcctcgtctccagccgagg

SEQ ID NO: 5040 - DNA, 28 bp, synthetic construct
  source 1..28: mol_type = other DNA
gccgcagaccccttctcacctcttgagg

SEQ ID NO: 5041 - DNA, 28 bp, synthetic construct
  source 1..28: mol_type = other DNA
ccctcaagaggtgagaaggggtctgcgg

SEQ ID NO: 5042 - DNA, 28 bp, synthetic construct
  source 1..28: mol_type = other DNA
ccgcagaccccttctcacctcttgaggg

SEQ ID NO: 5043 - DNA, 28 bp, synthetic construct
  source 1..28: mol_type = other DNA
cgcagaccccttctcacctcttgagggg

SEQ ID NO: 5044 - DNA, 28 bp, synthetic construct
  source 1..28: mol_type = other DNA
gcagaccccttctcacctcttgaggggg

SEQ ID NO: 5045 - DNA, 28 bp, synthetic construct
  source 1..28: mol_type = other DNA
gaggaccccctcaagaggtgagaagggg

SEQ ID NO: 5046 - DNA, 28 bp, synthetic construct
  source 1..28: mol_type = other DNA
ggaggaccccctcaagaggtgagaaggg

SEQ ID NO: 5047 - DNA, 28 bp, synthetic construct
  source 1..28: mol_type = other DNA
gggaggaccccctcaagaggtgagaagg

SEQ ID NO: 5048 - DNA, 28 bp, synthetic construct
  source 1..28: mol_type = other DNA
ccaggagggggaggaccccctcaagagg

SEQ ID NO: 5049 - DNA, 28 bp, synthetic construct
  source 1..28: mol_type = other DNA
cctcttgagggggtcctccccctcctgg

SEQ ID NO: 5050 - DNA, 28 bp, synthetic construct
  source 1..28: mol_type = other DNA
gtcctccccctcctggtgctccctctgg

SEQ ID NO: 5051 - DNA, 28 bp, synthetic construct
  source 1..28: mol_type = other DNA
tcctccccctcctggtgctccctctggg

SEQ ID NO: 5052 - DNA, 28 bp, synthetic construct
  source 1..28: mol_type = other DNA
acccagagggagcaccaggagggggagg

SEQ ID NO: 5053 - DNA, 28 bp, synthetic construct
  source 1..28: mol_type = other DNA
gggacccagagggagcaccaggaggggg

SEQ ID NO: 5054 - DNA, 28 bp, synthetic construct
  source 1..28: mol_type = other DNA
ggggacccagagggagcaccaggagggg

SEQ ID NO: 5055 - DNA, 28 bp, synthetic construct
  source 1..28: mol_type = other DNA
gggggacccagagggagcaccaggaggg

SEQ ID NO: 5056 - DNA, 28 bp, synthetic construct
  source 1..28: mol_type = other DNA
agggggacccagagggagcaccaggagg

SEQ ID NO: 5057 - DNA, 28 bp, synthetic construct
  source 1..28: mol_type = other DNA
tcctggtgctccctctgggtccccctgg

SEQ ID NO: 5058 - DNA, 28 bp, synthetic construct
  source 1..28: mol_type = other DNA
accagggggacccagagggagcaccagg

SEQ ID NO: 5059 - DNA, 28 bp, synthetic construct
  source 1..28: mol_type = other DNA
gctacaacaaccagggggacccagaggg

SEQ ID NO: 5060 - DNA, 28 bp, synthetic construct
  source 1..28: mol_type = other DNA
tgctacaacaaccagggggacccagagg

SEQ ID NO: 5061 - DNA, 28 bp, synthetic construct
  source 1..28: mol_type = other DNA
cagttaagctgctacaacaaccaggggg

SEQ ID NO: 5062 - DNA, 28 bp, synthetic construct
  source 1..28: mol_type = other DNA
acagttaagctgctacaacaaccagggg

SEQ ID NO: 5063 - DNA, 28 bp, synthetic construct
  source 1..28: mol_type = other DNA
tacagttaagctgctacaacaaccaggg

SEQ ID NO: 5064 - DNA, 28 bp, synthetic construct
  source 1..28: mol_type = other DNA
atacagttaagctgctacaacaaccagg

SEQ ID NO: 5065 - DNA, 28 bp, synthetic construct
  source 1..28: mol_type = other DNA
gttgttgtagcagcttaactgtatctgg

SEQ ID NO: 5066 - DNA, 28 bp, synthetic construct
  source 1..28: mol_type = other DNA
tagcagcttaactgtatctggagccagg

SEQ ID NO: 5067 - DNA, 28 bp, synthetic construct
  source 1..28: mol_type = other DNA
aggtaggaggtgcgagttcaggtcctgg

SEQ ID NO: 5068 - DNA, 28 bp, synthetic construct
  source 1..28: mol_type = other DNA
atgaagaggtaggaggtgcgagttcagg

SEQ ID NO: 5069 - DNA, 28 bp, synthetic construct
  source 1..28: mol_type = other DNA
gtatatgtaaacatgaagaggtaggagg

SEQ ID NO: 5070 - DNA, 28 bp, synthetic construct
  source 1..28: mol_type = other DNA
tgggtatatgtaaacatgaagaggtagg

SEQ ID NO: 5071 - DNA, 28 bp, synthetic construct
  source 1..28: mol_type = other DNA
atactgggtatatgtaaacatgaagagg

SEQ ID NO: 5072 - DNA, 28 bp, synthetic construct
  source 1..28: mol_type = other DNA
tatacccagtatctttgcacaaaccagg

SEQ ID NO: 5073 - DNA, 28 bp, synthetic construct
  source 1..28: mol_type = other DNA
atacccagtatctttgcacaaaccaggg

SEQ ID NO: 5074 - DNA, 28 bp, synthetic construct
  source 1..28: mol_type = other DNA
tacccagtatctttgcacaaaccagggg

SEQ ID NO: 5075 - DNA, 28 bp, synthetic construct
  source 1..28: mol_type = other DNA
aacccctggtttgtgcaaagatactggg

SEQ ID NO: 5076 - DNA, 28 bp, synthetic construct
  source 1..28: mol_type = other DNA
caacccctggtttgtgcaaagatactgg

SEQ ID NO: 5077 - DNA, 28 bp, synthetic construct
  source 1..28: mol_type = other DNA
cagtatctttgcacaaaccaggggttgg

SEQ ID NO: 5078 - DNA, 28 bp, synthetic construct
  source 1..28: mol_type = other DNA
agtatctttgcacaaaccaggggttggg

SEQ ID NO: 5079 - DNA, 28 bp, synthetic construct
  source 1..28: mol_type = other DNA
gtatctttgcacaaaccaggggttgggg

SEQ ID NO: 5080 - DNA, 28 bp, synthetic construct
  source 1..28: mol_type = other DNA
tatctttgcacaaaccaggggttggggg

SEQ ID NO: 5081 - DNA, 28 bp, synthetic construct
  source 1..28: mol_type = other DNA
ctttgcacaaaccaggggttgggggagg

SEQ ID NO: 5082 - DNA, 28 bp, synthetic construct
  source 1..28: mol_type = other DNA
tttgcacaaaccaggggttgggggaggg

SEQ ID NO: 5083 - DNA, 28 bp, synthetic construct
  source 1..28: mol_type = other DNA
aaaccaggggttgggggagggtctctgg

SEQ ID NO: 5084 - DNA, 28 bp, synthetic construct
  source 1..28: mol_type = other DNA
aagccagagaccctcccccaacccctgg

SEQ ID NO: 5085 - DNA, 28 bp, synthetic construct
  source 1..28: mol_type = other DNA
aaactgactttaaaaaatataaaatagg

SEQ ID NO: 5086 - DNA, 28 bp, synthetic construct
  source 1..28: mol_type = other DNA
attttatattttttaaagtcagtttagg

SEQ ID NO: 5087 - RNA, 20 nt, synthetic construct
  source 1..20: mol_type = other RNA
aagaacagataaagtacttg

SEQ ID NO: 5088 - RNA, 20 nt, synthetic construct
  source 1..20: mol_type = other RNA
cataataaccagaattgaaa

SEQ ID NO: 5089 - RNA, 20 nt, synthetic construct
  source 1..20: mol_type = other RNA
tattcattccttttcaattc

SEQ ID NO: 5090 - RNA, 20 nt, synthetic construct
  source 1..20: mol_type = other RNA
acatcacacaagttttaaaa

SEQ ID NO: 5091 - RNA, 20 nt, synthetic construct
  source 1..20: mol_type = other RNA
tttttaaaacttgtgtgatg

SEQ ID NO: 5092 - RNA, 20 nt, synthetic construct
  source 1..20: mol_type = other RNA
aaaaacaataaaatagtaat

SEQ ID NO: 5093 - RNA, 20 nt, synthetic construct
  source 1..20: mol_type = other RNA
aaaacaataaaatagtaatt

SEQ ID NO: 5094 - RNA, 20 nt, synthetic construct
  source 1..20: mol_type = other RNA
aaacaataaaatagtaattg

SEQ ID NO: 5095 - RNA, 20 nt, synthetic construct
  source 1..20: mol_type = other RNA
gaaaaaacccttcactctat

SEQ ID NO: 5096 - RNA, 20 nt, synthetic construct
  source 1..20: mol_type = other RNA
aaagacaccaatagagtgaa

SEQ ID NO: 5097 - RNA, 20 nt, synthetic construct
  source 1..20: mol_type = other RNA
actctattggtgtctttgtc

SEQ ID NO: 5098 - RNA, 20 nt, synthetic construct
  source 1..20: mol_type = other RNA
cccagaatcactaaaattcc

SEQ ID NO: 5099 - RNA, 20 nt, synthetic construct
  source 1..20: mol_type = other RNA
cctggaattttagtgattct

SEQ ID NO: 5100 - RNA, 20 nt, synthetic construct
  source 1..20: mol_type = other RNA
acctggaattttagtgattc

SEQ ID NO: 5101 - RNA, 20 nt, synthetic construct
  source 1..20: mol_type = other RNA
cactaaaattccaggtcaac

SEQ ID NO: 5102 - RNA, 20 nt, synthetic construct
  source 1..20: mol_type = other RNA
tcaggtactacctgttgacc

SEQ ID NO: 5103 - RNA, 20 nt, synthetic construct
  source 1..20: mol_type = other RNA
acagtatacttgaataattc

SEQ ID NO: 5104 - RNA, 20 nt, synthetic construct
  source 1..20: mol_type = other RNA
ctctcttcagctaacagatt

SEQ ID NO: 5105 - RNA, 20 nt, synthetic construct
  source 1..20: mol_type = other RNA
tgatttgcactgaattaact

SEQ ID NO: 5106 - RNA, 20 nt, synthetic construct
  source 1..20: mol_type = other RNA
aaaaataacgttcgaactgt

SEQ ID NO: 5107 - RNA, 20 nt, synthetic construct
  source 1..20: mol_type = other RNA
cgaactgtaggaaatgcttc

SEQ ID NO: 5108 - RNA, 20 nt, synthetic construct
  source 1..20: mol_type = other RNA
gaaatctttgcaagtgttct

SEQ ID NO: 5109 - RNA, 20 nt, synthetic construct
  source 1..20: mol_type = other RNA
tgaaatgctgagttaagaaa

SEQ ID NO: 5110 - RNA, 20 nt, synthetic construct
  source 1..20: mol_type = other RNA
gaaatgctgagttaagaaat

SEQ ID NO: 5111 - RNA, 20 nt, synthetic construct
  source 1..20: mol_type = other RNA
gacccttttaagttgcagtg

SEQ ID NO: 5112 - RNA, 20 nt, synthetic construct
  source 1..20: mol_type = other RNA
acccttttaagttgcagtga

SEQ ID NO: 5113 - RNA, 20 nt, synthetic construct
  source 1..20: mol_type = other RNA
accctcactgcaacttaaaa

SEQ ID NO: 5114 - RNA, 20 nt, synthetic construct
  source 1..20: mol_type = other RNA
aaccctcactgcaacttaaa

SEQ ID NO: 5115 - RNA, 20 nt, synthetic construct
  source 1..20: mol_type = other RNA
tatgaagactatttgcaatg

SEQ ID NO: 5116 - RNA, 20 nt, synthetic construct
  source 1..20: mol_type = other RNA
atgaagactatttgcaatgt

SEQ ID NO: 5117 - RNA, 20 nt, synthetic construct
  source 1..20: mol_type = other RNA
ctatttgcaatgtgggcaaa

SEQ ID NO: 5118 - RNA, 20 nt, synthetic construct
  source 1..20: mol_type = other RNA
tatttgcaatgtgggcaaaa

SEQ ID NO: 5119 - RNA, 20 nt, synthetic construct
  source 1..20: mol_type = other RNA
tgggcaaaagggaaacagag

SEQ ID NO: 5120 - RNA, 20 nt, synthetic construct
  source 1..20: mol_type = other RNA
gggcaaaagggaaacagaga

SEQ ID NO: 5121 - RNA, 20 nt, synthetic construct
  source 1..20: mol_type = other RNA
aacagagagggaagagctga

SEQ ID NO: 5122 - RNA, 20 nt, synthetic construct
  source 1..20: mol_type = other RNA
agagctgaaggttgtatttg

SEQ ID NO: 5123 - RNA, 20 nt, synthetic construct
  source 1..20: mol_type = other RNA
ctgaaggttgtatttgtgga

SEQ ID NO: 5124 - RNA, 20 nt, synthetic construct
  source 1..20: mol_type = other RNA
tattcaattctagaaaaatt

SEQ ID NO: 5125 - RNA, 20 nt, synthetic construct
  source 1..20: mol_type = other RNA
ggtgagatatatcatacatt

SEQ ID NO: 5126 - RNA, 20 nt, synthetic construct
  source 1..20: mol_type = other RNA
gtgagatatatcatacatta

SEQ ID NO: 5127 - RNA, 20 nt, synthetic construct
  source 1..20: mol_type = other RNA
tgagatatatcatacattag

SEQ ID NO: 5128 - RNA, 20 nt, synthetic construct
  source 1..20: mol_type = other RNA
ttaggggataaaacagatta

SEQ ID NO: 5129 - RNA, 20 nt, synthetic construct
  source 1..20: mol_type = other RNA
gattatggagataaatttac

SEQ ID NO: 5130 - RNA, 20 nt, synthetic construct
  source 1..20: mol_type = other RNA
aatttactggaatataattg

SEQ ID NO: 5131 - RNA, 20 nt, synthetic construct
  source 1..20: mol_type = other RNA
ttctatctccagaacatgtt

SEQ ID NO: 5132 - RNA, 20 nt, synthetic construct
  source 1..20: mol_type = other RNA
tctatctccagaacatgttt

SEQ ID NO: 5133 - RNA, 20 nt, synthetic construct
  source 1..20: mol_type = other RNA
aaacatgttctggagataga

SEQ ID NO: 5134 - RNA, 20 nt, synthetic construct
  source 1..20: mol_type = other RNA
tctccagaacatgtttgggt

SEQ ID NO: 5135 - RNA, 20 nt, synthetic construct
  source 1..20: mol_type = other RNA
ctccagaacatgtttgggtt

SEQ ID NO: 5136 - RNA, 20 nt, synthetic construct
  source 1..20: mol_type = other RNA
cacccaacccaaacatgttc

SEQ ID NO: 5137 - RNA, 20 nt, synthetic construct
  source 1..20: mol_type = other RNA
catgtttgggttgggtgaga

SEQ ID NO: 5138 - RNA, 20 nt, synthetic construct
  source 1..20: mol_type = other RNA
atgtttgggttgggtgagaa

SEQ ID NO: 5139 - RNA, 20 nt, synthetic construct
  source 1..20: mol_type = other RNA
tgggtgagaagggttgatat

SEQ ID NO: 5140 - RNA, 20 nt, synthetic construct
  source 1..20: mol_type = other RNA
caaattaacttactgatatg

SEQ ID NO: 5141 - RNA, 20 nt, synthetic construct
  source 1..20: mol_type = other RNA
tgttaccaaatcttgagaaa

SEQ ID NO: 5142 - RNA, 20 nt, synthetic construct
  source 1..20: mol_type = other RNA
accaaatcttgagaaatgga

SEQ ID NO: 5143 - RNA, 20 nt, synthetic construct
  source 1..20: mol_type = other RNA
tccttccatttctcaagatt

SEQ ID NO: 5144 - RNA, 20 nt, synthetic construct
  source 1..20: mol_type = other RNA
ggaaggaatgtctaactttt

SEQ ID NO: 5145 - RNA, 20 nt, synthetic construct
  source 1..20: mol_type = other RNA
gatcacagtgaaacaaagtc

SEQ ID NO: 5146 - RNA, 20 nt, synthetic construct
  source 1..20: mol_type = other RNA
agcgactgctcgttgatgtc

SEQ ID NO: 5147 - RNA, 20 nt, synthetic construct
  source 1..20: mol_type = other RNA
caataaaaaaaaattttttt

SEQ ID NO: 5148 - RNA, 20 nt, synthetic construct
  source 1..20: mol_type = other RNA
ttttttaggtttaatttcat

SEQ ID NO: 5149 - RNA, 20 nt, synthetic construct
  source 1..20: mol_type = other RNA
tcataggtgatagatagcaa

SEQ ID NO: 5150 - RNA, 20 nt, synthetic construct
  source 1..20: mol_type = other RNA
cataggtgatagatagcaat

SEQ ID NO: 5151 - RNA, 20 nt, synthetic construct
  source 1..20: mol_type = other RNA
atacgtaatggaatgaaaag

SEQ ID NO: 5152 - RNA, 20 nt, synthetic construct
  source 1..20: mol_type = other RNA
aatcaaaaattcatacgtaa

SEQ ID NO: 5153 - RNA, 20 nt, synthetic construct
  source 1..20: mol_type = other RNA
tttttaaatgacaatactaa

SEQ ID NO: 5154 - RNA, 20 nt, synthetic construct
  source 1..20: mol_type = other RNA
acaagatgcagagattttgc

SEQ ID NO: 5155 - RNA, 20 nt, synthetic construct
  source 1..20: mol_type = other RNA
agatgcagagattttgctgg

SEQ ID NO: 5156 - RNA, 20 nt, synthetic construct
  source 1..20: mol_type = other RNA
gcagagattttgctggaggc

SEQ ID NO: 5157 - RNA, 20 nt, synthetic construct
  source 1..20: mol_type = other RNA
atttgggggtggggggtggg

SEQ ID NO: 5158 - RNA, 20 nt, synthetic construct
  source 1..20: mol_type = other RNA
accccccacccccaaatttc

SEQ ID NO: 5159 - RNA, 20 nt, synthetic construct
  source 1..20: mol_type = other RNA
aaatttgggggtggggggtg

SEQ ID NO: 5160 - RNA, 20 nt, synthetic construct
  source 1..20: mol_type = other RNA
gaaatttgggggtggggggt

SEQ ID NO: 5161 - RNA, 20 nt, synthetic construct
  source 1..20: mol_type = other RNA
tgaaatttgggggtgggggg

SEQ ID NO: 5162 - RNA, 20 nt, synthetic construct
  source 1..20: mol_type = other RNA
cacccccaaatttcaggtcc

SEQ ID NO: 5163 - RNA, 20 nt, synthetic construct
  source 1..20: mol_type = other RNA
gacctgaaatttgggggtgg

SEQ ID NO: 5164 - RNA, 20 nt, synthetic construct
  source 1..20: mol_type = other RNA
ggacctgaaatttgggggtg

SEQ ID NO: 5165 - RNA, 20 nt, synthetic construct
  source 1..20: mol_type = other RNA
tggacctgaaatttgggggt

SEQ ID NO: 5166 - RNA, 20 nt, synthetic construct
  source 1..20: mol_type = other RNA
ctggacctgaaatttggggg

SEQ ID NO: 5167 - RNA, 20 nt, synthetic construct
  source 1..20: mol_type = other RNA
aacctggacctgaaatttgg

SEQ ID NO: 5168 - RNA, 20 nt, synthetic construct
  source 1..20: mol_type = other RNA
aaacctggacctgaaatttg

SEQ ID NO: 5169 - RNA, 20 nt, synthetic construct
  source 1..20: mol_type = other RNA
caaacctggacctgaaattt

SEQ ID NO: 5170 - RNA, 20 nt, synthetic construct
  source 1..20: mol_type = other RNA
gcaaacctggacctgaaatt

SEQ ID NO: 5171 - RNA, 20 nt, synthetic construct
  source 1..20: mol_type = other RNA
tagtgatgatatagcaaacc

SEQ ID NO: 5172 - RNA, 20 nt, synthetic construct
  source 1..20: mol_type = other RNA
agtccttttttaattctcac

SEQ ID NO: 5173 - RNA, 20 nt, synthetic construct
  source 1..20: mol_type = other RNA
tttccagtgagaattaaaaa

SEQ ID NO: 5174 - RNA, 20 nt, synthetic construct
  source 1..20: mol_type = other RNA
acatcattctctaatatatt

SEQ ID NO: 5175 - RNA, 20 nt, synthetic construct
  source 1..20: mol_type = other RNA
acaatgttatcacaatgaag

SEQ ID NO: 5176 - RNA, 20 nt, synthetic construct
  source 1..20: mol_type = other RNA
cacaatgaagtggcaacttt

SEQ ID NO: 5177 - RNA, 20 nt, synthetic construct
  source 1..20: mol_type = other RNA
tgatgataggtacagtctaa

SEQ ID NO: 5178 - RNA, 20 nt, synthetic construct
  source 1..20: mol_type = other RNA
tatcatcagcaatcataaaa

SEQ ID NO: 5179 - RNA, 20 nt, synthetic construct
  source 1..20: mol_type = other RNA
tttttatgattgctgatgat

SEQ ID NO: 5180 - RNA, 20 nt, synthetic construct
  source 1..20: mol_type = other RNA
aaataaacagtgctattcca

SEQ ID NO: 5181 - RNA, 20 nt, synthetic construct
  source 1..20: mol_type = other RNA
tggaatagcactgtttattt

SEQ ID NO: 5182 - RNA, 20 nt, synthetic construct
  source 1..20: mol_type = other RNA
aacagtttcagatgtcacct

SEQ ID NO: 5183 - RNA, 20 nt, synthetic construct
  source 1..20: mol_type = other RNA
aaaaatcataatgacaaaac

SEQ ID NO: 5184 - RNA, 20 nt, synthetic construct
  source 1..20: mol_type = other RNA
aaaatcataatgacaaaaca

SEQ ID NO: 5185 - RNA, 20 nt, synthetic construct
  source 1..20: mol_type = other RNA
aaatcataatgacaaaacag

SEQ ID NO: 5186 - RNA, 20 nt, synthetic construct
  source 1..20: mol_type = other RNA
ttacacttttaaaattgcat

SEQ ID NO: 5187 - RNA, 20 nt, synthetic construct
  source 1..20: mol_type = other RNA
ttcactcatgtacctactca

SEQ ID NO: 5188 - RNA, 20 nt, synthetic construct
  source 1..20: mol_type = other RNA
tcactcatgtacctactcat

SEQ ID NO: 5189 - RNA, 20 nt, synthetic construct
  source 1..20: mol_type = other RNA
actcatgggaagaacatcta

SEQ ID NO: 5190 - RNA, 20 nt, synthetic construct
  source 1..20: mol_type = other RNA
tagatgttcttcccatgagt

SEQ ID NO: 5191 - RNA, 20 nt, synthetic construct
  source 1..20: mol_type = other RNA
caaatgaaaaattcccctcc

SEQ ID NO: 5192 - RNA, 20 nt, synthetic construct
  source 1..20: mol_type = other RNA
aaatgaaaaattcccctcca

SEQ ID NO: 5193 - RNA, 20 nt, synthetic construct
  source 1..20: mol_type = other RNA
agctggttatgtccctggag

SEQ ID NO: 5194 - RNA, 20 nt, synthetic construct
  source 1..20: mol_type = other RNA
gagctggttatgtccctgga

SEQ ID NO: 5195 - RNA, 20 nt, synthetic construct
  source 1..20: mol_type = other RNA
tgagctggttatgtccctgg

SEQ ID NO: 5196 - RNA, 20 nt, synthetic construct
  source 1..20: mol_type = other RNA
ttctgagctggttatgtccc

SEQ ID NO: 5197 - RNA, 20 nt, synthetic construct
  source 1..20: mol_type = other RNA
tttttcagatggttctgagc

SEQ ID NO: 5198 - RNA, 20 nt, synthetic construct
  source 1..20: mol_type = other RNA
tttgtatgaattttttcaga

SEQ ID NO: 5199 - RNA, 20 nt, synthetic construct
  source 1..20: mol_type = other RNA
acaaaagcagaaattaccca

SEQ ID NO: 5200 - RNA, 20 nt, synthetic construct
  source 1..20: mol_type = other RNA
gatgaggactcacaggcctt

SEQ ID NO: 5201 - RNA, 20 nt, synthetic construct
  source 1..20: mol_type = other RNA
agatgaggactcacaggcct

SEQ ID NO: 5202 - RNA, 20 nt, synthetic construct
  source 1..20: mol_type = other RNA
ggtatgagatgaggactcac

SEQ ID NO: 5203 - RNA, 20 nt, synthetic construct
  source 1..20: mol_type = other RNA
ggctttcatggtatgagatg

SEQ ID NO: 5204 - RNA, 20 nt, synthetic construct
  source 1..20: mol_type = other RNA
aaagccagactgtcaaaaaa

SEQ ID NO: 5205 - RNA, 20 nt, synthetic construct
  source 1..20: mol_type = other RNA
aagccagactgtcaaaaaaa

SEQ ID NO: 5206 - RNA, 20 nt, synthetic construct
  source 1..20: mol_type = other RNA
gtgccctttttttgacagtc

SEQ ID NO: 5207 - RNA, 20 nt, synthetic construct
  source 1..20: mol_type = other RNA
gggcacatgtcactttgcaa

SEQ ID NO: 5208 - RNA, 20 nt, synthetic construct
  source 1..20: mol_type = other RNA
aatgtattaactcctctccc

SEQ ID NO: 5209 - RNA, 20 nt, synthetic construct
  source 1..20: mol_type = other RNA
atgtattaactcctctccca

SEQ ID NO: 5210 - RNA, 20 nt, synthetic construct
  source 1..20: mol_type = other RNA
gactaagttgaccctgggag

SEQ ID NO: 5211 - RNA, 20 nt, synthetic construct
  source 1..20: mol_type = other RNA
acgtagactaagttgaccct

SEQ ID NO: 5212 - RNA, 20 nt, synthetic construct
  source 1..20: mol_type = other RNA
cacgtagactaagttgaccc

SEQ ID NO: 5213 - RNA, 20 nt, synthetic construct
  source 1..20: mol_type = other RNA
tgaacatctagtagatctgg

SEQ ID NO: 5214 - RNA, 20 nt, synthetic construct
  source 1..20: mol_type = other RNA
gactgaacatctagtagatc

SEQ ID NO: 5215 - RNA, 20 nt, synthetic construct
  source 1..20: mol_type = other RNA
atgttcagtcatgtcctttc

SEQ ID NO: 5216 - RNA, 20 nt, synthetic construct
  source 1..20: mol_type = other RNA
catgtcctttcaggtcctga

SEQ ID NO: 5217 - RNA, 20 nt, synthetic construct
  source 1..20: mol_type = other RNA
tcctttcaggtcctgaaggc

SEQ ID NO: 5218 - RNA, 20 nt, synthetic construct
  source 1..20: mol_type = other RNA
gcctgccttcaggacctgaa

SEQ ID NO: 5219 - RNA, 20 nt, synthetic construct
  source 1..20: mol_type = other RNA
cagagagtgagcctgccttc

SEQ ID NO: 5220 - RNA, 20 nt, synthetic construct
  source 1..20: mol_type = other RNA
tgatgcatctttttatatca

SEQ ID NO: 5221 - RNA, 20 nt, synthetic construct
  source 1..20: mol_type = other RNA
tgcatctttttatatcatgg

SEQ ID NO: 5222 - RNA, 20 nt, synthetic construct
  source 1..20: mol_type = other RNA
gcatctttttatatcatggt

SEQ ID NO: 5223 - RNA, 20 nt, synthetic construct
  source 1..20: mol_type = other RNA
ggtgggtgtgaagtgaaaag

SEQ ID NO: 5224 - RNA, 20 nt, synthetic construct
  source 1..20: mol_type = other RNA
tctaaatatggactaattgt

SEQ ID NO: 5225 - RNA, 20 nt, synthetic construct
  source 1..20: mol_type = other RNA
ttctaaatatggactaattg

SEQ ID NO: 5226 - RNA, 20 nt, synthetic construct
  source 1..20: mol_type = other RNA
catatttagaaaactttctg

SEQ ID NO: 5227 - RNA, 20 nt, synthetic construct
  source 1..20: mol_type = other RNA
atatttagaaaactttctgt

SEQ ID NO: 5228 - RNA, 20 nt, synthetic construct
  source 1..20: mol_type = other RNA
cacagaaagttttctaaata

SEQ ID NO: 5229 - RNA, 20 nt, synthetic construct
  source 1..20: mol_type = other RNA
catttcaaatgggaaattaa

SEQ ID NO: 5230 - RNA, 20 nt, synthetic construct
  source 1..20: mol_type = other RNA
agctggttttcatttcaaat

SEQ ID NO: 5231 - RNA, 20 nt, synthetic construct
  source 1..20: mol_type = other RNA
tagctggttttcatttcaaa

SEQ ID NO: 5232 - RNA, 20 nt, synthetic construct
  source 1..20: mol_type = other RNA
ctttagaatttagaattagc

SEQ ID NO: 5233 - RNA, 20 nt, synthetic construct
  source 1..20: mol_type = other RNA
aattctaaattctaaagccc

SEQ ID NO: 5234 - RNA, 20 nt, synthetic construct
  source 1..20: mol_type = other RNA
attctaaattctaaagccct

SEQ ID NO: 5235 - RNA, 20 nt, synthetic construct
  source 1..20: mol_type = other RNA
ttctaaattctaaagccctg

SEQ ID NO: 5236 - RNA, 20 nt, synthetic construct
  source 1..20: mol_type = other RNA
tctaaattctaaagccctgg

SEQ ID NO: 5237 - RNA, 20 nt, synthetic construct
  source 1..20: mol_type = other RNA
agccctgggggaaaccttcc

SEQ ID NO: 5238 - RNA, 20 nt, synthetic construct
  source 1..20: mol_type = other RNA
agcctggaaggtttccccca

SEQ ID NO: 5239 - RNA, 20 nt, synthetic construct
  source 1..20: mol_type = other RNA
aagcctggaaggtttccccc

SEQ ID NO: 5240 - RNA, 20 nt, synthetic construct
  source 1..20: mol_type = other RNA
tctgatagacaaagcctgga

SEQ ID NO: 5241 - RNA, 20 nt, synthetic construct
  source 1..20: mol_type = other RNA
tctgtctgatagacaaagcc

SEQ ID NO: 5242 - RNA, 20 nt, synthetic construct
  source 1..20: mol_type = other RNA
acaaaaataaaacattacgc

SEQ ID NO: 5243 - RNA, 20 nt, synthetic construct
  source 1..20: mol_type = other RNA
atgatatgcttggtgctgtt

SEQ ID NO: 5244 - RNA, 20 nt, synthetic construct
  source 1..20: mol_type = other RNA
ttgagcatctatgatatgct

SEQ ID NO: 5245 - RNA, 20 nt, synthetic construct
  source 1..20: mol_type = other RNA
atttattaagagtaataaca

SEQ ID NO: 5246 - RNA, 20 nt, synthetic construct
  source 1..20: mol_type = other RNA
caaccaccattttgtaaaat

SEQ ID NO: 5247 - RNA, 20 nt, synthetic construct
  source 1..20: mol_type = other RNA
ctattttacaaaatggtggt

SEQ ID NO: 5248 - RNA, 20 nt, synthetic construct
  source 1..20: mol_type = other RNA
ttgcctattttacaaaatgg

SEQ ID NO: 5249 - RNA, 20 nt, synthetic construct
  source 1..20: mol_type = other RNA
gttttgcctattttacaaaa

SEQ ID NO: 5250 - RNA, 20 nt, synthetic construct
  source 1..20: mol_type = other RNA
cctgatttgataaagcagtg

SEQ ID NO: 5251 - RNA, 20 nt, synthetic construct
  source 1..20: mol_type = other RNA
ccacactgctttatcaaatc

SEQ ID NO: 5252 - RNA, 20 nt, synthetic construct
  source 1..20: mol_type = other RNA
gttgagtgtcaaggctactg

SEQ ID NO: 5253 - RNA, 20 nt, synthetic construct
  source 1..20: mol_type = other RNA
cgttgcactgttgagtgtca

SEQ ID NO: 5254 - RNA, 20 nt, synthetic construct
  source 1..20: mol_type = other RNA
gtttccactgcaatatgaac

SEQ ID NO: 5255 - RNA, 20 nt, synthetic construct
  source 1..20: mol_type = other RNA
ggaaccagttcatattgcag

SEQ ID NO: 5256 - RNA, 20 nt, synthetic construct
  source 1..20: mol_type = other RNA
aactggttcccacagctctt

SEQ ID NO: 5257 - RNA, 20 nt, synthetic construct
  source 1..20: mol_type = other RNA
ctctatctcctaagagctgt

SEQ ID NO: 5258 - RNA, 20 nt, synthetic construct
  source 1..20: mol_type = other RNA
actctatctcctaagagctg

SEQ ID NO: 5259 - RNA, 20 nt, synthetic construct
  source 1..20: mol_type = other RNA
atagagtgtaatcacttaaa

SEQ ID NO: 5260 - RNA, 20 nt, synthetic construct
  source 1..20: mol_type = other RNA
tagagtgtaatcacttaaat

SEQ ID NO: 5261 - RNA, 20 nt, synthetic construct
  source 1..20: mol_type = other RNA
ctctaattccacttgagaaa

SEQ ID NO: 5262 - RNA, 20 nt, synthetic construct
  source 1..20: mol_type = other RNA
ataacataccttttctcaag

SEQ ID NO: 5263 - RNA, 20 nt, synthetic construct
  source 1..20: mol_type = other RNA
gaaaattattaatatatttc

SEQ ID NO: 5264 - RNA, 20 nt, synthetic construct
  source 1..20: mol_type = other RNA
aaaattattaatatatttca

SEQ ID NO: 5265 - RNA, 20 nt, synthetic construct
  source 1..20: mol_type = other RNA
attaatatatttcagggaga

SEQ ID NO: 5266 - RNA, 20 nt, synthetic construct
  source 1..20: mol_type = other RNA
tttgagggatgctgaatgag

SEQ ID NO: 5267 - RNA, 20 nt, synthetic construct
  source 1..20: mol_type = other RNA
agcatccctcaaagtaatgc

SEQ ID NO: 5268 - RNA, 20 nt, synthetic construct
  source 1..20: mol_type = other RNA
ttatgcctgcattactttga

SEQ ID NO: 5269 - RNA, 20 nt, synthetic construct
  source 1..20: mol_type = other RNA
cttatgcctgcattactttg

SEQ ID NO: 5270 - RNA, 20 nt, synthetic construct
  source 1..20: mol_type = other RNA
gtaatgcaggcataagtatc

SEQ ID NO: 5271 - RNA, 20 nt, synthetic construct
  source 1..20: mol_type = other RNA
taatgcaggcataagtatca

SEQ ID NO: 5272 - RNA, 20 nt, synthetic construct
  source 1..20: mol_type = other RNA
aatgcaggcataagtatcag

SEQ ID NO: 5273 - RNA, 20 nt, synthetic construct
  source 1..20: mol_type = other RNA
tgtactgaagttatataaca

SEQ ID NO: 5274 - RNA, 20 nt, synthetic construct
  source 1..20: mol_type = other RNA
gaaagcagctactacagatg

SEQ ID NO: 5275 - RNA, 20 nt, synthetic construct
  source 1..20: mol_type = other RNA
ttttacagttgtgacacccc

SEQ ID NO: 5276 - RNA, 20 nt, synthetic construct
  source 1..20: mol_type = other RNA
tttacagttgtgacacccct

SEQ ID NO: 5277 - RNA, 20 nt, synthetic construct
  source 1..20: mol_type = other RNA
tctcatgtctgtcatcccag

SEQ ID NO: 5278 - RNA, 20 nt, synthetic construct
  source 1..20: mol_type = other RNA
ggatgacagacatgagaata

SEQ ID NO: 5279 - RNA, 20 nt, synthetic construct
  source 1..20: mol_type = other RNA
attctcatgtctgtcatccc

SEQ ID NO: 5280 - RNA, 20 nt, synthetic construct
  source 1..20: mol_type = other RNA
tgacagacatgagaatatgg

SEQ ID NO: 5281 - RNA, 20 nt, synthetic construct
  source 1..20: mol_type = other RNA
atgagaatatggaggattaa

SEQ ID NO: 5282 - RNA, 20 nt, synthetic construct
  source 1..20: mol_type = other RNA
ttacaaaacttaaacaaaaa

SEQ ID NO: 5283 - RNA, 20 nt, synthetic construct
  source 1..20: mol_type = other RNA
tacaaaacttaaacaaaaaa

SEQ ID NO: 5284 - RNA, 20 nt, synthetic construct
  source 1..20: mol_type = other RNA
ggggttttcacataacatag

SEQ ID NO: 5285 - RNA, 20 nt, synthetic construct
  source 1..20: mol_type = other RNA
atgtgaaaaccccttacaaa

SEQ ID NO: 5286 - RNA, 20 nt, synthetic construct
  source 1..20: mol_type = other RNA
aataaactgccttttgtaag

SEQ ID NO: 5287 - RNA, 20 nt, synthetic construct
  source 1..20: mol_type = other RNA
caataaactgccttttgtaa

SEQ ID NO: 5288 - RNA, 20 nt, synthetic construct
  source 1..20: mol_type = other RNA
tcaataaactgccttttgta

SEQ ID NO: 5289 - RNA, 20 nt, synthetic construct
  source 1..20: mol_type = other RNA
aataaatgctttatacattc

SEQ ID NO: 5290 - RNA, 20 nt, synthetic construct
  source 1..20: mol_type = other RNA
ttcccatctctcaatagtga

SEQ ID NO: 5291 - RNA, 20 nt, synthetic construct
  source 1..20: mol_type = other RNA
aaccatcactattgagagat

SEQ ID NO: 5292 - RNA, 20 nt, synthetic construct
  source 1..20: mol_type = other RNA
aaaccatcactattgagaga

SEQ ID NO: 5293 - RNA, 20 nt, synthetic construct
  source 1..20: mol_type = other RNA
tcactactgagtttcttctt

SEQ ID NO: 5294 - RNA, 20 nt, synthetic construct
  source 1..20: mol_type = other RNA
tcattcacaagatgctttga

SEQ ID NO: 5295 - RNA, 20 nt, synthetic construct
  source 1..20: mol_type = other RNA
catcttgtgaatgagagaaa

SEQ ID NO: 5296 - RNA, 20 nt, synthetic construct
  source 1..20: mol_type = other RNA
gtgaatgagagaaatggaac

SEQ ID NO: 5297 - RNA, 20 nt, synthetic construct
  source 1..20: mol_type = other RNA
gagagaaatggaactggacc

SEQ ID NO: 5298 - RNA, 20 nt, synthetic construct
  source 1..20: mol_type = other RNA
agagaaatggaactggacct

SEQ ID NO: 5299 - RNA, 20 nt, synthetic construct
  source 1..20: mol_type = other RNA
aatggaactggacctgggca

SEQ ID NO: 5300 - RNA, 20 nt, synthetic construct
  source 1..20: mol_type = other RNA
aactggacctgggcaaggca

SEQ ID NO: 5301 - RNA, 20 nt, synthetic construct
  source 1..20: mol_type = other RNA
actggacctgggcaaggcat

SEQ ID NO: 5302 - RNA, 20 nt, synthetic construct
  source 1..20: mol_type = other RNA
ctggacctgggcaaggcatg

SEQ ID NO: 5303 - RNA, 20 nt, synthetic construct
  source 1..20: mol_type = other RNA
acctgggcaaggcatgggga

SEQ ID NO: 5304 - RNA, 20 nt, synthetic construct
  source 1..20: mol_type = other RNA
accatccccatgccttgccc

SEQ ID NO: 5305 - RNA, 20 nt, synthetic construct
  source 1..20: mol_type = other RNA
agctaaatcatttattcata

SEQ ID NO: 5306 - RNA, 20 nt, synthetic construct
  source 1..20: mol_type = other RNA
aaatgatttagctgttgatg

SEQ ID NO: 5307 - RNA, 20 nt, synthetic construct
  source 1..20: mol_type = other RNA
gatgtggacagcaagagagt

SEQ ID NO: 5308 - RNA, 20 nt, synthetic construct
  source 1..20: mol_type = other RNA
gtggacagcaagagagttgg

SEQ ID NO: 5309 - RNA, 20 nt, synthetic construct
  source 1..20: mol_type = other RNA
tggacagcaagagagttggt

SEQ ID NO: 5310 - RNA, 20 nt, synthetic construct
  source 1..20: mol_type = other RNA
cagacctgaccacgctacaa

SEQ ID NO: 5311 - RNA, 20 nt, synthetic construct
  source 1..20: mol_type = other RNA
agacctgaccacgctacaaa

SEQ ID NO: 5312 - RNA, 20 nt, synthetic construct
  source 1..20: mol_type = other RNA
agaccctttgtagcgtggtc

SEQ ID NO: 5313 - RNA, 20 nt, synthetic construct
  source 1..20: mol_type = other RNA
ttcacagaccctttgtagcg

SEQ ID NO: 5314 - RNA, 20 nt, synthetic construct
  source 1..20: mol_type = other RNA
gtctgtgaagaacacagtac

SEQ ID NO: 5315 - RNA, 20 nt, synthetic construct
  source 1..20: mol_type = other RNA
tttttagtttagttttgttt

SEQ ID NO: 5316 - RNA, 20 nt, synthetic construct
  source 1..20: mol_type = other RNA
actttgccaaactgtaaaca

SEQ ID NO: 5317 - RNA, 20 nt, synthetic construct
  source 1..20: mol_type = other RNA
gctttaccttgtttacagtt

SEQ ID NO: 5318 - RNA, 20 nt, synthetic construct
  source 1..20: mol_type = other RNA
aacaaggtaaagcatttcac

SEQ ID NO: 5319 - RNA, 20 nt, synthetic construct
  source 1..20: mol_type = other RNA
tttcacaggttcaaagttca

SEQ ID NO: 5320 - RNA, 20 nt, synthetic construct
  source 1..20: mol_type = other RNA
ttcacaggttcaaagttcaa

SEQ ID NO: 5321 - RNA, 20 nt, synthetic construct
  source 1..20: mol_type = other RNA
tcaaccctgatttaaaaata

SEQ ID NO: 5322 - RNA, 20 nt, synthetic construct
  source 1..20: mol_type = other RNA
ctagccatatttttaaatca

SEQ ID NO: 5323 - RNA, 20 nt, synthetic construct
  source 1..20: mol_type = other RNA
gctagccatatttttaaatc

SEQ ID NO: 5324 - RNA, 20 nt, synthetic construct
  source 1..20: mol_type = other RNA
aaatatggctagcaaaaaca

SEQ ID NO: 5325 - RNA, 20 nt, synthetic construct
  source 1..20: mol_type = other RNA
gctcaggatgtcgacagctg

SEQ ID NO: 5326 - RNA, 20 nt, synthetic construct
  source 1..20: mol_type = other RNA
tcgacatcctgagcaagcat

SEQ ID NO: 5327 - RNA, 20 nt, synthetic construct
  source 1..20: mol_type = other RNA
aaggagaccgatgcttgctc

SEQ ID NO: 5328 - RNA, 20 nt, synthetic construct
  source 1..20: mol_type = other RNA
ttgggagtgcagcttctcaa

SEQ ID NO: 5329 - RNA, 20 nt, synthetic construct
  source 1..20: mol_type = other RNA
agcagcttgagaagaggctt

SEQ ID NO: 5330 - RNA, 20 nt, synthetic construct
  source 1..20: mol_type = other RNA
tagcagcttgagaagaggct

SEQ ID NO: 5331 - RNA, 20 nt, synthetic construct
  source 1..20: mol_type = other RNA
tcttctcaagctgctacacg

SEQ ID NO: 5332 - RNA, 20 nt, synthetic construct
  source 1..20: mol_type = other RNA
tctcaagctgctacacgagg

SEQ ID NO: 5333 - RNA, 20 nt, synthetic construct
  source 1..20: mol_type = other RNA
ggaaataaagagaactgaga

SEQ ID NO: 5334 - RNA, 20 nt, synthetic construct
  source 1..20: mol_type = other RNA
tctctttatttccacactct

SEQ ID NO: 5335 - RNA, 20 nt, synthetic construct
  source 1..20: mol_type = other RNA
atcgatgtattccaagagtg

SEQ ID NO: 5336 - RNA, 20 nt, synthetic construct
  source 1..20: mol_type = other RNA
acatcgattgctttccattt

SEQ ID NO: 5337 - RNA, 20 nt, synthetic construct
  source 1..20: mol_type = other RNA
cattttggtgtctacagttc

SEQ ID NO: 5338 - RNA, 20 nt, synthetic construct
  source 1..20: mol_type = other RNA
cagaactgtagacaccaaaa

SEQ ID NO: 5339 - RNA, 20 nt, synthetic construct
  source 1..20: mol_type = other RNA
ggctgctatagatttagacg

SEQ ID NO: 5340 - RNA, 20 nt, synthetic construct
  source 1..20: mol_type = other RNA
gctgctatagatttagacgt

SEQ ID NO: 5341 - RNA, 20 nt, synthetic construct
  source 1..20: mol_type = other RNA
ctgctatagatttagacgtg

SEQ ID NO: 5342 - RNA, 20 nt, synthetic construct
  source 1..20: mol_type = other RNA
agatttagacgtggggatac

SEQ ID NO: 5343 - RNA, 20 nt, synthetic construct
  source 1..20: mol_type = other RNA
tttagacgtggggatactgg

SEQ ID NO: 5344 - RNA, 20 nt, synthetic construct
  source 1..20: mol_type = other RNA
agacgtggggatactggagg

SEQ ID NO: 5345 - RNA, 20 nt, synthetic construct
  source 1..20: mol_type = other RNA
gacgtggggatactggagga

SEQ ID NO: 5346 - RNA, 20 nt, synthetic construct
  source 1..20: mol_type = other RNA
tggggatactggaggaggga

SEQ ID NO: 5347 - RNA, 20 nt, synthetic construct
  source 1..20: mol_type = other RNA
gaggagggaaggcaaattct

SEQ ID NO: 5348 - RNA, 20 nt, synthetic construct
  source 1..20: mol_type = other RNA
gagggaaggcaaattctcgg

SEQ ID NO: 5349 - RNA, 20 nt, synthetic construct
  source 1..20: mol_type = other RNA
caaattctcggaggatgctc

SEQ ID NO: 5350 - RNA, 20 nt, synthetic construct
  source 1..20: mol_type = other RNA
aaattctcggaggatgctcc

SEQ ID NO: 5351 - RNA, 20 nt, synthetic construct
  source 1..20: mol_type = other RNA
gggcaacttcgacattattc

SEQ ID NO: 5352 - RNA, 20 nt, synthetic construct
  source 1..20: mol_type = other RNA
ggcaacttcgacattattct

SEQ ID NO: 5353 - RNA, 20 nt, synthetic construct
  source 1..20: mol_type = other RNA
agaataatgtcgaagttgcc

SEQ ID NO: 5354 - RNA, 20 nt, synthetic construct
  source 1..20: mol_type = other RNA
attattctgggctatctcta

SEQ ID NO: 5355 - RNA, 20 nt, synthetic construct
  source 1..20: mol_type = other RNA
ggctctcttcacctcttcaa

SEQ ID NO: 5356 - RNA, 20 nt, synthetic construct
  source 1..20: mol_type = other RNA
agagggttatgcctttgaag

SEQ ID NO: 5357 - RNA, 20 nt, synthetic construct
  source 1..20: mol_type = other RNA
attgcaaaactcatgggaga

SEQ ID NO: 5358 - RNA, 20 nt, synthetic construct
  source 1..20: mol_type = other RNA
aattgcaaaactcatgggag

SEQ ID NO: 5359 - RNA, 20 nt, synthetic construct
  source 1..20: mol_type = other RNA
gcaaaaattgcaaaactcat

SEQ ID NO: 5360 - RNA, 20 nt, synthetic construct
  source 1..20: mol_type = other RNA
tgcaaaaattgcaaaactca

SEQ ID NO: 5361 - RNA, 20 nt, synthetic construct
  source 1..20: mol_type = other RNA
acattttccaatgccgcctc

SEQ ID NO: 5362 - RNA, 20 nt, synthetic construct
  source 1..20: mol_type = other RNA
ccaatgccgcctcaggccca

SEQ ID NO: 5363 - RNA, 20 nt, synthetic construct
  source 1..20: mol_type = other RNA
caatgccgcctcaggcccat

SEQ ID NO: 5364 - RNA, 20 nt, synthetic construct
  source 1..20: mol_type = other RNA
aatgccgcctcaggcccatg

SEQ ID NO: 5365 - RNA, 20 nt, synthetic construct
  source 1..20: mol_type = other RNA
ccatgggcctgaggcggcat

SEQ ID NO: 5366 - RNA, 20 nt, synthetic construct
  source 1..20: mol_type = other RNA
aaaaccccatgggcctgagg

SEQ ID NO: 5367 - RNA, 20 nt, synthetic construct
  source 1..20: mol_type = other RNA
caggcccatggggttttctg

SEQ ID NO: 5368 - RNA, 20 nt, synthetic construct
  source 1..20: mol_type = other RNA
cagaaaaccccatgggcctg

SEQ ID NO: 5369 - RNA, 20 nt, synthetic construct
  source 1..20: mol_type = other RNA
ttcaccacagaaaaccccat

SEQ ID NO: 5370 - RNA, 20 nt, synthetic construct
  source 1..20: mol_type = other RNA
attcaccacagaaaacccca

SEQ ID NO: 5371 - RNA, 20 nt, synthetic construct
  source 1..20: mol_type = other RNA
ggttttctgtggtgaatttc

SEQ ID NO: 5372 - RNA, 20 nt, synthetic construct
  source 1..20: mol_type = other RNA
atttctggtgcagtcctgcg

SEQ ID NO: 5373 - RNA, 20 nt, synthetic construct
  source 1..20: mol_type = other RNA
ggtgcagtcctgcgcggtcg

SEQ ID NO: 5374 - RNA, 20 nt, synthetic construct
  source 1..20: mol_type = other RNA
gtcctgcgcggtcgtggttt

SEQ ID NO: 5375 - RNA, 20 nt, synthetic construct
  source 1..20: mol_type = other RNA
tcctgcgcggtcgtggttta

SEQ ID NO: 5376 - RNA, 20 nt, synthetic construct
  source 1..20: mol_type = other RNA
cctgcgcggtcgtggtttag

SEQ ID NO: 5377 - RNA, 20 nt, synthetic construct
  source 1..20: mol_type = other RNA
ctgcgcggtcgtggtttagg

SEQ ID NO: 5378 - RNA, 20 nt, synthetic construct
  source 1..20: mol_type = other RNA
cccctaaaccacgaccgcgc

SEQ ID NO: 5379 - RNA, 20 nt, synthetic construct
  source 1..20: mol_type = other RNA
cggtcgtggtttagggggtc

SEQ ID NO: 5380 - RNA, 20 nt, synthetic construct
  source 1..20: mol_type = other RNA
cgtggtttagggggtctggc

SEQ ID NO: 5381 - RNA, 20 nt, synthetic construct
  source 1..20: mol_type = other RNA
aatctacacagatggttcac

SEQ ID NO: 5382 - RNA, 20 nt, synthetic construct
  source 1..20: mol_type = other RNA
tctttaaaaatctacacaga

SEQ ID NO: 5383 - RNA, 20 nt, synthetic construct
  source 1..20: mol_type = other RNA
gccaactcacctgaacatga

SEQ ID NO: 5384 - RNA, 20 nt, synthetic construct
  source 1..20: mol_type = other RNA
tccttcatgttcaggtgagt

SEQ ID NO: 5385 - RNA, 20 nt, synthetic construct
  source 1..20: mol_type = other RNA
gatcagcttccttcatgttc

SEQ ID NO: 5386 - RNA, 20 nt, synthetic construct
  source 1..20: mol_type = other RNA
caaaactaacagaacatcac

SEQ ID NO: 5387 - RNA, 20 nt, synthetic construct
  source 1..20: mol_type = other RNA
ttagttttgacattttcacc

SEQ ID NO: 5388 - RNA, 20 nt, synthetic construct
  source 1..20: mol_type = other RNA
tcacctggtaaccttctagc

SEQ ID NO: 5389 - RNA, 20 nt, synthetic construct
  source 1..20: mol_type = other RNA
cctggtaaccttctagcagg

SEQ ID NO: 5390 - RNA, 20 nt, synthetic construct
  source 1..20: mol_type = other RNA
cctcctgctagaaggttacc

SEQ ID NO: 5391 - RNA, 20 nt, synthetic construct
  source 1..20: mol_type = other RNA
aaccttctagcaggaggcaa

SEQ ID NO: 5392 - RNA, 20 nt, synthetic construct
  source 1..20: mol_type = other RNA
tagcaggaggcaaaggaact

SEQ ID NO: 5393 - RNA, 20 nt, synthetic construct
  source 1..20: mol_type = other RNA
gccacttgctagatcaacaa

SEQ ID NO: 5394 - RNA, 20 nt, synthetic construct
  source 1..20: mol_type = other RNA
ccacttgctagatcaacaaa

SEQ ID NO: 5395 - RNA, 20 nt, synthetic construct
  source 1..20: mol_type = other RNA
ccctttgttgatctagcaag

SEQ ID NO: 5396 - RNA, 20 nt, synthetic construct
  source 1..20: mol_type = other RNA
aatgtgataatttaccacct

SEQ ID NO: 5397 - RNA, 20 nt, synthetic construct
  source 1..20: mol_type = other RNA
accaccttggcagtcagaga

SEQ ID NO: 5398 - RNA, 20 nt, synthetic construct
  source 1..20: mol_type = other RNA
ccaccttggcagtcagagac

SEQ ID NO: 5399 - RNA, 20 nt, synthetic construct
  source 1..20: mol_type = other RNA
caccttggcagtcagagacg

SEQ ID NO: 5400 - RNA, 20 nt, synthetic construct
  source 1..20: mol_type = other RNA
cccgtctctgactgccaagg

SEQ ID NO: 5401 - RNA, 20 nt, synthetic construct
  source 1..20: mol_type = other RNA
tgccccgtctctgactgcca

SEQ ID NO: 5402 - RNA, 20 nt, synthetic construct
  source 1..20: mol_type = other RNA
aaaatatgatatttactaac

SEQ ID NO: 5403 - RNA, 20 nt, synthetic construct
  source 1..20: mol_type = other RNA
tatttactaactggaactaa

SEQ ID NO: 5404 - RNA, 20 nt, synthetic construct
  source 1..20: mol_type = other RNA
atttactaactggaactaaa

SEQ ID NO: 5405 - RNA, 20 nt, synthetic construct
  source 1..20: mol_type = other RNA
attaataccataaacccaac

SEQ ID NO: 5406 - RNA, 20 nt, synthetic construct
  source 1..20: mol_type = other RNA
tgttaaaccagttgggttta

SEQ ID NO: 5407 - RNA, 20 nt, synthetic construct
  source 1..20: mol_type = other RNA
ctatgaatgttaaaccagtt

SEQ ID NO: 5408 - RNA, 20 nt, synthetic construct
  source 1..20: mol_type = other RNA
actatgaatgttaaaccagt

SEQ ID NO: 5409 - RNA, 20 nt, synthetic construct
  source 1..20: mol_type = other RNA
ttaacattcatagtattata

SEQ ID NO: 5410 - RNA, 20 nt, synthetic construct
  source 1..20: mol_type = other RNA
taacattcatagtattatat

SEQ ID NO: 5411 - RNA, 20 nt, synthetic construct
  source 1..20: mol_type = other RNA
aatgtttgtctactcaaaaa

SEQ ID NO: 5412 - RNA, 20 nt, synthetic construct
  source 1..20: mol_type = other RNA
taatgtttgtctactcaaaa

SEQ ID NO: 5413 - RNA, 20 nt, synthetic construct
  source 1..20: mol_type = other RNA
aacattacatctgaaaacct

SEQ ID NO: 5414 - RNA, 20 nt, synthetic construct
  source 1..20: mol_type = other RNA
gataaattattagtgaacca

SEQ ID NO: 5415 - RNA, 20 nt, synthetic construct
  source 1..20: mol_type = other RNA
ctagctatcactcccacctc

SEQ ID NO: 5416 - RNA, 20 nt, synthetic construct
  source 1..20: mol_type = other RNA
aaagcagcggtgcctgaggt

SEQ ID NO: 5417 - RNA, 20 nt, synthetic construct
  source 1..20: mol_type = other RNA
gaaagcagcggtgcctgagg

SEQ ID NO: 5418 - RNA, 20 nt, synthetic construct
  source 1..20: mol_type = other RNA
gaggaaagcagcggtgcctg

SEQ ID NO: 5419 - RNA, 20 nt, synthetic construct
  source 1..20: mol_type = other RNA
gtactatgagaggaaagcag

SEQ ID NO: 5420 - RNA, 20 nt, synthetic construct
  source 1..20: mol_type = other RNA
caacataaaagtactatgag

SEQ ID NO: 5421 - RNA, 20 nt, synthetic construct
  source 1..20: mol_type = other RNA
aagtaccgtcaattcttctg

SEQ ID NO: 5422 - RNA, 20 nt, synthetic construct
  source 1..20: mol_type = other RNA
ccgtcaattcttctgaggac

SEQ ID NO: 5423 - RNA, 20 nt, synthetic construct
  source 1..20: mol_type = other RNA
cgtcaattcttctgaggaca

SEQ ID NO: 5424 - RNA, 20 nt, synthetic construct
  source 1..20: mol_type = other RNA
cctgtcctcagaagaattga

SEQ ID NO: 5425 - RNA, 20 nt, synthetic construct
  source 1..20: mol_type = other RNA
cttctgaggacagggatctg

SEQ ID NO: 5426 - RNA, 20 nt, synthetic construct
  source 1..20: mol_type = other RNA
ttctgaggacagggatctga

SEQ ID NO: 5427 - RNA, 20 nt, synthetic construct
  source 1..20: mol_type = other RNA
ataattcaaacatgagaagt

SEQ ID NO: 5428 - RNA, 20 nt, synthetic construct
  source 1..20: mol_type = other RNA
ggtgctatgtttgatttagg

SEQ ID NO: 5429 - RNA, 20 nt, synthetic construct
  source 1..20: mol_type = other RNA
ctaggtgctatgtttgattt

SEQ ID NO: 5430 - RNA, 20 nt, synthetic construct
  source 1..20: mol_type = other RNA
catagcacctagaacactct

SEQ ID NO: 5431 - RNA, 20 nt, synthetic construct
  source 1..20: mol_type = other RNA
ctatttgccaagagtgttct

SEQ ID NO: 5432 - RNA, 20 nt, synthetic construct
  source 1..20: mol_type = other RNA
aatttgtgtggatttatttg

SEQ ID NO: 5433 - RNA, 20 nt, synthetic construct
  source 1..20: mol_type = other RNA
gtgaacaatctgaatttgtg

SEQ ID NO: 5434 - RNA, 20 nt, synthetic construct
  source 1..20: mol_type = other RNA
ttgctttacattagcaattc

SEQ ID NO: 5435 - RNA, 20 nt, synthetic construct
  source 1..20: mol_type = other RNA
taaaacaatgaaattcaatc

SEQ ID NO: 5436 - RNA, 20 nt, synthetic construct
  source 1..20: mol_type = other RNA
ttaaaacaatgaaattcaat

SEQ ID NO: 5437 - RNA, 20 nt, synthetic construct
  source 1..20: mol_type = other RNA
attattaatgtctaagggag

SEQ ID NO: 5438 - RNA, 20 nt, synthetic construct
  source 1..20: mol_type = other RNA
tacatattattaatgtctaa

SEQ ID NO: 5439 - RNA, 20 nt, synthetic construct
  source 1..20: mol_type = other RNA
ttacatattattaatgtcta

SEQ ID NO: 5440 - RNA, 20 nt, synthetic construct
  source 1..20: mol_type = other RNA
attacttacgatgaaaacat

SEQ ID NO: 5441 - RNA, 20 nt, synthetic construct
  source 1..20: mol_type = other RNA
tttttatattagtttttgac

SEQ ID NO: 5442 - RNA, 20 nt, synthetic construct
  source 1..20: mol_type = other RNA
gtttttgactggataatgta

SEQ ID NO: 5443 - RNA, 20 nt, synthetic construct
  source 1..20: mol_type = other RNA
ttgactggataatgtaaggc

SEQ ID NO: 5444 - RNA, 20 nt, synthetic construct
  source 1..20: mol_type = other RNA
cattatcttttcaccttttt

SEQ ID NO: 5445 - RNA, 20 nt, synthetic construct
  source 1..20: mol_type = other RNA
caaaaaaggtgaaaagataa

SEQ ID NO: 5446 - RNA, 20 nt, synthetic construct
  source 1..20: mol_type = other RNA
taattattatactccaaaaa

SEQ ID NO: 5447 - RNA, 20 nt, synthetic construct
  source 1..20: mol_type = other RNA
aattatcaccagctttgctg

SEQ ID NO: 5448 - RNA, 20 nt, synthetic construct
  source 1..20: mol_type = other RNA
caaaaagtcctcagcaaagc

SEQ ID NO: 5449 - RNA, 20 nt, synthetic construct
  source 1..20: mol_type = other RNA
aggactttttgacttagaca

SEQ ID NO: 5450 - RNA, 20 nt, synthetic construct
  source 1..20: mol_type = other RNA
gttttcaatatttgaagaat

SEQ ID NO: 5451 - RNA, 20 nt, synthetic construct
  source 1..20: mol_type = other RNA
ttcaatatttgaagaattgg

SEQ ID NO: 5452 - RNA, 20 nt, synthetic construct
  source 1..20: mol_type = other RNA
ttctggaaaattaatggagc

SEQ ID NO: 5453 - RNA, 20 nt, synthetic construct
  source 1..20: mol_type = other RNA
aattttccagaaatattttt

SEQ ID NO: 5454 - RNA, 20 nt, synthetic construct
  source 1..20: mol_type = other RNA
ttccagaaatatttttagga

SEQ ID NO: 5455 - RNA, 20 nt, synthetic construct
  source 1..20: mol_type = other RNA
ttccttcctaaaaatatttc

SEQ ID NO: 5456 - RNA, 20 nt, synthetic construct
  source 1..20: mol_type = other RNA
atgagacaatgttgatcttt

SEQ ID NO: 5457 - RNA, 20 nt, synthetic construct
  source 1..20: mol_type = other RNA
tggtttgttagagaaaccaa

SEQ ID NO: 5458 - RNA, 20 nt, synthetic construct
  source 1..20: mol_type = other RNA
gaaaccaaaggaaacaaata

SEQ ID NO: 5459 - RNA, 20 nt, synthetic construct
  source 1..20: mol_type = other RNA
atcaccatatttgtttcctt

SEQ ID NO: 5460 - RNA, 20 nt, synthetic construct
  source 1..20: mol_type = other RNA
atatctagtgcaaaatcttt

SEQ ID NO: 5461 - RNA, 20 nt, synthetic construct
  source 1..20: mol_type = other RNA
aatatctagtgcaaaatctt

SEQ ID NO: 5462 - RNA, 20 nt, synthetic construct
  source 1..20: mol_type = other RNA
tatttcataaaatttacttt

SEQ ID NO: 5463 - RNA, 20 nt, synthetic construct
  source 1..20: mol_type = other RNA
ctgatacaacattaagtcag

SEQ ID NO: 5464 - RNA, 20 nt, synthetic construct
  source 1..20: mol_type = other RNA
ctgacttaatgttgtatcag

SEQ ID NO: 5465 - RNA, 20 nt, synthetic construct
  source 1..20: mol_type = other RNA
tctgacttaatgttgtatca

SEQ ID NO: 5466 - RNA, 20 nt, synthetic construct
  source 1..20: mol_type = other RNA
ctctgacttaatgttgtatc

SEQ ID NO: 5467 - RNA, 20 nt, synthetic construct
  source 1..20: mol_type = other RNA
tacacttgcttatttcttta

SEQ ID NO: 5468 - RNA, 20 nt, synthetic construct
  source 1..20: mol_type = other RNA
acacttgcttatttctttac

SEQ ID NO: 5469 - RNA, 20 nt, synthetic construct
  source 1..20: mol_type = other RNA
tttctttacgggaaatttat

SEQ ID NO: 5470 - RNA, 20 nt, synthetic construct
  source 1..20: mol_type = other RNA
tctaatcatctatttattta

SEQ ID NO: 5471 - RNA, 20 nt, synthetic construct
  source 1..20: mol_type = other RNA
taaggttaaaaagtaaactc

SEQ ID NO: 5472 - RNA, 20 nt, synthetic construct
  source 1..20: mol_type = other RNA
tatattttatagtctatgta

SEQ ID NO: 5473 - RNA, 20 nt, synthetic construct
  source 1..20: mol_type = other RNA
aatggaagaatatagtacag

SEQ ID NO: 5474 - RNA, 20 nt, synthetic construct
  source 1..20: mol_type = other RNA
attaaactatattatttaaa

SEQ ID NO: 5475 - RNA, 20 nt, synthetic construct
  source 1..20: mol_type = other RNA
ttttaaataatatagtttaa

SEQ ID NO: 5476 - RNA, 20 nt, synthetic construct
  source 1..20: mol_type = other RNA
atagcaaaaatacctgctta

SEQ ID NO: 5477 - RNA, 20 nt, synthetic construct
  source 1..20: mol_type = other RNA
ttcaaaacagaaccataagc

SEQ ID NO: 5478 - RNA, 20 nt, synthetic construct
  source 1..20: mol_type = other RNA
gtttgctatttgtcagccat

SEQ ID NO: 5479 - RNA, 20 nt, synthetic construct
  source 1..20: mol_type = other RNA
tttgctatttgtcagccata

SEQ ID NO: 5480 - RNA, 20 nt, synthetic construct
  source 1..20: mol_type = other RNA
ttgtcagccatagggtaaac

SEQ ID NO: 5481 - RNA, 20 nt, synthetic construct
  source 1..20: mol_type = other RNA
tgtcagccatagggtaaact

SEQ ID NO: 5482 - RNA, 20 nt, synthetic construct
  source 1..20: mol_type = other RNA
agagagcccagtttacccta

SEQ ID NO: 5483 - RNA, 20 nt, synthetic construct
  source 1..20: mol_type = other RNA
tctaaagcaaattataaagt

SEQ ID NO: 5484 - RNA, 20 nt, synthetic construct
  source 1..20: mol_type = other RNA
ttataaagttggaagcattc

SEQ ID NO: 5485 - RNA, 20 nt, synthetic construct
  source 1..20: mol_type = other RNA
tggaagcattcaggctttaa

SEQ ID NO: 5486 - RNA, 20 nt, synthetic construct
  source 1..20: mol_type = other RNA
ggaagcattcaggctttaaa

SEQ ID NO: 5487 - RNA, 20 nt, synthetic construct
  source 1..20: mol_type = other RNA
caggtgtgcaccactacact

SEQ ID NO: 5488 - RNA, 20 nt, synthetic construct
  source 1..20: mol_type = other RNA
acctgtaatcccagctactt

SEQ ID NO: 5489 - RNA, 20 nt, synthetic construct
  source 1..20: mol_type = other RNA
cctgtaatcccagctactta

SEQ ID NO: 5490 - RNA, 20 nt, synthetic construct
  source 1..20: mol_type = other RNA
ctgtaatcccagctacttag

SEQ ID NO: 5491 - RNA, 20 nt, synthetic construct
  source 1..20: mol_type = other RNA
tgtaatcccagctacttagg

SEQ ID NO: 5492 - RNA, 20 nt, synthetic construct
  source 1..20: mol_type = other RNA
ccctaagtagctgggattac

SEQ ID NO: 5493 - RNA, 20 nt, synthetic construct
  source 1..20: mol_type = other RNA
cccagctacttagggggtag

SEQ ID NO: 5494 - RNA, 20 nt, synthetic construct
  source 1..20: mol_type = other RNA
gctacttagggggtagaggc

SEQ ID NO: 5495 - RNA, 20 nt, synthetic construct
  source 1..20: mol_type = other RNA
cctctaccccctaagtagct

SEQ ID NO: 5496 - RNA, 20 nt, synthetic construct
  source 1..20: mol_type = other RNA
gcctctaccccctaagtagc

SEQ ID NO: 5497 - RNA, 20 nt, synthetic construct
  source 1..20: mol_type = other RNA
caggagaatcacttgaacct

SEQ ID NO: 5498 - RNA, 20 nt, synthetic construct
  source 1..20: mol_type = other RNA
gagaatcacttgaaccttgg

SEQ ID NO: 5499 - RNA, 20 nt, synthetic construct
  source 1..20: mol_type = other RNA
cacttgaaccttggaggcag

SEQ ID NO: 5500 - RNA, 20 nt, synthetic construct
  source 1..20: mol_type = other RNA
cactgcaacctctgcctcca

SEQ ID NO: 5501 - RNA, 20 nt, synthetic construct
  source 1..20: mol_type = other RNA
cgcaccactgtactccagcc

SEQ ID NO: 5502 - RNA, 20 nt, synthetic construct
  source 1..20: mol_type = other RNA
gcaccactgtactccagcct

SEQ ID NO: 5503 - RNA, 20 nt, synthetic construct
  source 1..20: mol_type = other RNA
ttgcccaggctggagtacag

SEQ ID NO: 5504 - RNA, 20 nt, synthetic construct
  source 1..20: mol_type = other RNA
tctcactctgttgcccaggc

SEQ ID NO: 5505 - RNA, 20 nt, synthetic construct
  source 1..20: mol_type = other RNA
agggtctcactctgttgccc

SEQ ID NO: 5506 - RNA, 20 nt, synthetic construct
  source 1..20: mol_type = other RNA
ttttttttttttttgagaca

SEQ ID NO: 5507 - RNA, 20 nt, synthetic construct
  source 1..20: mol_type = other RNA
tttttttttttttttgagac

SEQ ID NO: 5508 - RNA, 20 nt, synthetic construct
  source 1..20: mol_type = other RNA
ggcttttccctcctacctga

SEQ ID NO: 5509 - RNA, 20 nt, synthetic construct
  source 1..20: mol_type = other RNA
tcttcttccttcaggtagga

SEQ ID NO: 5510 - RNA, 20 nt, synthetic construct
  source 1..20: mol_type = other RNA
ttcttcttccttcaggtagg

SEQ ID NO: 5511 - RNA, 20 nt, synthetic construct
  source 1..20: mol_type = other RNA
tttttcttcttccttcaggt

SEQ ID NO: 5512 - RNA, 20 nt, synthetic construct
  source 1..20: mol_type = other RNA
gatctttttcttcttccttc

SEQ ID NO: 5513 - RNA, 20 nt, synthetic construct
  source 1..20: mol_type = other RNA
aagaaaaagatcctgtcctg

SEQ ID NO: 5514 - RNA, 20 nt, synthetic construct
  source 1..20: mol_type = other RNA
aaaagatcctgtcctgagga

SEQ ID NO: 5515 - RNA, 20 nt, synthetic construct
  source 1..20: mol_type = other RNA
gatcctgtcctgaggatggc

SEQ ID NO: 5516 - RNA, 20 nt, synthetic construct
  source 1..20: mol_type = other RNA
tcctgaggatggccggctac

SEQ ID NO: 5517 - RNA, 20 nt, synthetic construct
  source 1..20: mol_type = other RNA
tagccggccatcctcaggac

SEQ ID NO: 5518 - RNA, 20 nt, synthetic construct
  source 1..20: mol_type = other RNA
tccagtagccggccatcctc

SEQ ID NO: 5519 - RNA, 20 nt, synthetic construct
  source 1..20: mol_type = other RNA
gatggccggctactggagcc

SEQ ID NO: 5520 - RNA, 20 nt, synthetic construct
  source 1..20: mol_type = other RNA
ggccggctactggagccagg

SEQ ID NO: 5521 - RNA, 20 nt, synthetic construct
  source 1..20: mol_type = other RNA
aacctcctggctccagtagc

SEQ ID NO: 5522 - RNA, 20 nt, synthetic construct
  source 1..20: mol_type = other RNA
attgaacattcaaaacctcc

SEQ ID NO: 5523 - RNA, 20 nt, synthetic construct
  source 1..20: mol_type = other RNA
tcaatgagactatgccttgc

SEQ ID NO: 5524 - RNA, 20 nt, synthetic construct
  source 1..20: mol_type = other RNA
atgagactatgccttgcagg

SEQ ID NO: 5525 - RNA, 20 nt, synthetic construct
  source 1..20: mol_type = other RNA
agactatgccttgcaggagg

SEQ ID NO: 5526 - RNA, 20 nt, synthetic construct
  source 1..20: mol_type = other RNA
gactatgccttgcaggaggt

SEQ ID NO: 5527 - RNA, 20 nt, synthetic construct
  source 1..20: mol_type = other RNA
actatgccttgcaggaggtg

SEQ ID NO: 5528 - RNA, 20 nt, synthetic construct
  source 1..20: mol_type = other RNA
ctatgccttgcaggaggtgg

SEQ ID NO: 5529 - RNA, 20 nt, synthetic construct
  source 1..20: mol_type = other RNA
tgccttgcaggaggtggggg

SEQ ID NO: 5530 - RNA, 20 nt, synthetic construct
  source 1..20: mol_type = other RNA
cttgcaggaggtgggggagg

SEQ ID NO: 5531 - RNA, 20 nt, synthetic construct
  source 1..20: mol_type = other RNA
ttgcaggaggtgggggaggt

SEQ ID NO: 5532 - RNA, 20 nt, synthetic construct
  source 1..20: mol_type = other RNA
cacctcccccacctcctgca

SEQ ID NO: 5533 - RNA, 20 nt, synthetic construct
  source 1..20: mol_type = other RNA
ggtgggggaggtgggagaga

SEQ ID NO: 5534 - RNA, 20 nt, synthetic construct
  source 1..20: mol_type = other RNA
gggggaggtgggagagatgg

SEQ ID NO: 5535 - RNA, 20 nt, synthetic construct
  source 1..20: mol_type = other RNA
ggggaggtgggagagatgga

SEQ ID NO: 5536 - RNA, 20 nt, synthetic construct
  source 1..20: mol_type = other RNA
gaggtgggagagatggaggg

SEQ ID NO: 5537 - RNA, 20 nt, synthetic construct
  source 1..20: mol_type = other RNA
aggtgggagagatggaggga

SEQ ID NO: 5538 - RNA, 20 nt, synthetic construct
  source 1..20: mol_type = other RNA
cttcacctgcatttaaagaa

SEQ ID NO: 5539 - RNA, 20 nt, synthetic construct
  source 1..20: mol_type = other RNA
atcgacctttctttaaatgc

SEQ ID NO: 5540 - RNA, 20 nt, synthetic construct
  source 1..20: mol_type = other RNA
ttttaaaggtttcaacctaa

SEQ ID NO: 5541 - RNA, 20 nt, synthetic construct
  source 1..20: mol_type = other RNA
taaaggtttcaacctaatgg

SEQ ID NO: 5542 - RNA, 20 nt, synthetic construct
  source 1..20: mol_type = other RNA
aaaggtttcaacctaatgga

SEQ ID NO: 5543 - RNA, 20 nt, synthetic construct
  source 1..20: mol_type = other RNA
gatcttctcatccctccatt

SEQ ID NO: 5544 - RNA, 20 nt, synthetic construct
  source 1..20: mol_type = other RNA
gatgagaagatcataatcag

SEQ ID NO: 5545 - RNA, 20 nt, synthetic construct
  source 1..20: mol_type = other RNA
atgagaagatcataatcaga

SEQ ID NO: 5546 - RNA, 20 nt, synthetic construct
  source 1..20: mol_type = other RNA
ttgagtgaagaaccatgctt

SEQ ID NO: 5547 - RNA, 20 nt, synthetic construct
  source 1..20: mol_type = other RNA
agcatggttcttcactcaac

SEQ ID NO: 5548 - RNA, 20 nt, synthetic construct
  source 1..20: mol_type = other RNA
tgctttggattgtcccgagt

SEQ ID NO: 5549 - RNA, 20 nt, synthetic construct
  source 1..20: mol_type = other RNA
actcgggacaatccaaagca

SEQ ID NO: 5550 - RNA, 20 nt, synthetic construct
  source 1..20: mol_type = other RNA
tttggattgtcccgagttgg

SEQ ID NO: 5551 - RNA, 20 nt, synthetic construct
  source 1..20: mol_type = other RNA
attgtcccgagttggaggcc

SEQ ID NO: 5552 - RNA, 20 nt, synthetic construct
  source 1..20: mol_type = other RNA
tcccgagttggaggcctggc

SEQ ID NO: 5553 - RNA, 20 nt, synthetic construct
  source 1..20: mol_type = other RNA
cgagttggaggcctggcagg

SEQ ID NO: 5554 - RNA, 20 nt, synthetic construct
  source 1..20: mol_type = other RNA
acctgccaggcctccaactc

SEQ ID NO: 5555 - RNA, 20 nt, synthetic construct
  source 1..20: mol_type = other RNA
cacctgccaggcctccaact

SEQ ID NO: 5556 - RNA, 20 nt, synthetic construct
  source 1..20: mol_type = other RNA
ggaggcctggcaggtggtaa

SEQ ID NO: 5557 - RNA, 20 nt, synthetic construct
  source 1..20: mol_type = other RNA
cctggcaggtggtaatggca

SEQ ID NO: 5558 - RNA, 20 nt, synthetic construct
  source 1..20: mol_type = other RNA
ctggcaggtggtaatggcac

SEQ ID NO: 5559 - RNA, 20 nt, synthetic construct
  source 1..20: mol_type = other RNA
ccgtgccattaccacctgcc

SEQ ID NO: 5560 - RNA, 20 nt, synthetic construct
  source 1..20: mol_type = other RNA
tggtaatggcacgggatcag

SEQ ID NO: 5561 - RNA, 20 nt, synthetic construct
  source 1..20: mol_type = other RNA
gaatcaaaaacatctcctag

SEQ ID NO: 5562 - RNA, 20 nt, synthetic construct
  source 1..20: mol_type = other RNA
aaggttttgtgttatcctct

SEQ ID NO: 5563 - RNA, 20 nt, synthetic construct
  source 1..20: mol_type = other RNA
tttaaatatatgcttaagtc

SEQ ID NO: 5564 - RNA, 20 nt, synthetic construct
  source 1..20: mol_type = other RNA
ttaaatatatgcttaagtca

SEQ ID NO: 5565 - RNA, 20 nt, synthetic construct
  source 1..20: mol_type = other RNA
gacttaagcatatatttaaa

SEQ ID NO: 5566 - RNA, 20 nt, synthetic construct
  source 1..20: mol_type = other RNA
tgacttaagcatatatttaa

SEQ ID NO: 5567 - RNA, 20 nt, synthetic construct
  source 1..20: mol_type = other RNA
tttgatttcttctctgaaga

SEQ ID NO: 5568 - RNA, 20 nt, synthetic construct
  source 1..20: mol_type = other RNA
tgtatgctgaatggaacaca

SEQ ID NO: 5569 - RNA, 20 nt, synthetic construct
  source 1..20: mol_type = other RNA
aatggtcactgtatgctgaa

SEQ ID NO: 5570 - RNA, 20 nt, synthetic construct
  source 1..20: mol_type = other RNA
accattatcacaagacctaa

SEQ ID NO: 5571 - RNA, 20 nt, synthetic construct
  source 1..20: mol_type = other RNA
tcctttaggtcttgtgataa

SEQ ID NO: 5572 - RNA, 20 nt, synthetic construct
  source 1..20: mol_type = other RNA
tttactctgaactgtccttt

SEQ ID NO: 5573 - RNA, 20 nt, synthetic construct
  source 1..20: mol_type = other RNA
tgcccatactcttaccgaac

SEQ ID NO: 5574 - RNA, 20 nt, synthetic construct
  source 1..20: mol_type = other RNA
ccatactcttaccgaacagg

SEQ ID NO: 5575 - RNA, 20 nt, synthetic construct
  source 1..20: mol_type = other RNA
ctcctgttcggtaagagtat

SEQ ID NO: 5576 - RNA, 20 nt, synthetic construct
  source 1..20: mol_type = other RNA
cctcctgttcggtaagagta

SEQ ID NO: 5577 - RNA, 20 nt, synthetic construct
  source 1..20: mol_type = other RNA
ataatgtaaaacctcctgtt

SEQ ID NO: 5578 - RNA, 20 nt, synthetic construct
  source 1..20: mol_type = other RNA
tttacattatgacaatgaga

SEQ ID NO: 5579 - RNA, 20 nt, synthetic construct
  source 1..20: mol_type = other RNA
aatgagatggttgtgaattc

SEQ ID NO: 5580 - RNA, 20 nt, synthetic construct
  source 1..20: mol_type = other RNA
atgagatggttgtgaattca

SEQ ID NO: 5581 - RNA, 20 nt, synthetic construct
  source 1..20: mol_type = other RNA
ggttgtgaattcagggaaac

SEQ ID NO: 5582 - RNA, 20 nt, synthetic construct
  source 1..20: mol_type = other RNA
gttgtgaattcagggaaaca

SEQ ID NO: 5583 - RNA, 20 nt, synthetic construct
  source 1..20: mol_type = other RNA
gtgaattcagggaaacaggg

SEQ ID NO: 5584 - RNA, 20 nt, synthetic construct
  source 1..20: mol_type = other RNA
tgaattcagggaaacagggt

SEQ ID NO: 5585 - RNA, 20 nt, synthetic construct
  source 1..20: mol_type = other RNA
agggaaacagggtgggatga

SEQ ID NO: 5586 - RNA, 20 nt, synthetic construct
  source 1..20: mol_type = other RNA
tcatcatcatcttcctctac

SEQ ID NO: 5587 - RNA, 20 nt, synthetic construct
  source 1..20: mol_type = other RNA
catcatcatcttcctctact

SEQ ID NO: 5588 - RNA, 20 nt, synthetic construct
  source 1..20: mol_type = other RNA
gaaaacaagagacccagtag

SEQ ID NO: 5589 - RNA, 20 nt, synthetic construct
  source 1..20: mol_type = other RNA
tctgaaagagaatttgctaa

SEQ ID NO: 5590 - RNA, 20 nt, synthetic construct
  source 1..20: mol_type = other RNA
aacggaccagtacacctacc

SEQ ID NO: 5591 - RNA, 20 nt, synthetic construct
  source 1..20: mol_type = other RNA
acggaccagtacacctacca

SEQ ID NO: 5592 - RNA, 20 nt, synthetic construct
  source 1..20: mol_type = other RNA
cggaccagtacacctaccag

SEQ ID NO: 5593 - RNA, 20 nt, synthetic construct
  source 1..20: mol_type = other RNA
ttttcccctggtaggtgtac

SEQ ID NO: 5594 - RNA, 20 nt, synthetic construct
  source 1..20: mol_type = other RNA
tggattttttttcccctggt

SEQ ID NO: 5595 - RNA, 20 nt, synthetic construct
  source 1..20: mol_type = other RNA
aaagtgagttttgttgaatt

SEQ ID NO: 5596 - RNA, 20 nt, synthetic construct
  source 1..20: mol_type = other RNA
aacaaaactcactttatgct

SEQ ID NO: 5597 - RNA, 20 nt, synthetic construct
  source 1..20: mol_type = other RNA
acaaaactcactttatgcta

SEQ ID NO: 5598 - RNA, 20 nt, synthetic construct
  source 1..20: mol_type = other RNA
aaactcactttatgctaggg

SEQ ID NO: 5599 - RNA, 20 nt, synthetic construct
  source 1..20: mol_type = other RNA
ctcactttatgctagggagg

SEQ ID NO: 5600 - RNA, 20 nt, synthetic construct
  source 1..20: mol_type = other RNA
tcactttatgctagggagga

SEQ ID NO: 5601 - RNA, 20 nt, synthetic construct
  source 1..20: mol_type = other RNA
ctttatgctagggaggaggg

SEQ ID NO: 5602 - RNA, 20 nt, synthetic construct
  source 1..20: mol_type = other RNA
ctagggaggagggtggtaac

SEQ ID NO: 5603 - RNA, 20 nt, synthetic construct
  source 1..20: mol_type = other RNA
gggaggagggtggtaactgg

SEQ ID NO: 5604 - RNA, 20 nt, synthetic construct
  source 1..20: mol_type = other RNA
aggagggtggtaactggagg

SEQ ID NO: 5605 - RNA, 20 nt, synthetic construct
  source 1..20: mol_type = other RNA
agggtggtaactggaggagg

SEQ ID NO: 5606 - RNA, 20 nt, synthetic construct
  source 1..20: mol_type = other RNA
catcatattcttcacttcca

SEQ ID NO: 5607 - RNA, 20 nt, synthetic construct
  source 1..20: mol_type = other RNA
ttcacttccaaggtgaccat

SEQ ID NO: 5608 - RNA, 20 nt, synthetic construct
  source 1..20: mol_type = other RNA
gtcttttccaatggtcacct

SEQ ID NO: 5609 - RNA, 20 nt, synthetic construct
  source 1..20: mol_type = other RNA
tactttcaggtcttttccaa

SEQ ID NO: 5610 - RNA, 20 nt, synthetic construct
  source 1..20: mol_type = other RNA
taacaatttgatttactttc

SEQ ID NO: 5611 - RNA, 20 nt, synthetic construct
  source 1..20: mol_type = other RNA
cttaccttagctccttctaa

SEQ ID NO: 5612 - RNA, 20 nt, synthetic construct
  source 1..20: mol_type = other RNA
tttgcctttagaaggagcta

SEQ ID NO: 5613 - RNA, 20 nt, synthetic construct
  source 1..20: mol_type = other RNA
ctccttctaaaggcaaatca

SEQ ID NO: 5614 - RNA, 20 nt, synthetic construct
  source 1..20: mol_type = other RNA
cgccatgatttgcctttaga

SEQ ID NO: 5615 - RNA, 20 nt, synthetic construct
  source 1..20: mol_type = other RNA
ctgtgtttccgcataagcac

SEQ ID NO: 5616 - RNA, 20 nt, synthetic construct
  source 1..20: mol_type = other RNA
tgtgtttccgcataagcact

SEQ ID NO: 5617 - RNA, 20 nt, synthetic construct
  source 1..20: mol_type = other RNA
gctctgacccagtgcttatg

SEQ ID NO: 5618 - RNA, 20 nt, synthetic construct
  source 1..20: mol_type = other RNA
aatggaaggcacagtagagt

SEQ ID NO: 5619 - RNA, 20 nt, synthetic construct
  source 1..20: mol_type = other RNA
caatggaaggcacagtagag

SEQ ID NO: 5620 - RNA, 20 nt, synthetic construct
  source 1..20: mol_type = other RNA
cgagttcaaatgtcaatgga

SEQ ID NO: 5621 - RNA, 20 nt, synthetic construct
  source 1..20: mol_type = other RNA
acagcgagttcaaatgtcaa

SEQ ID NO: 5622 - RNA, 20 nt, synthetic construct
  source 1..20: mol_type = other RNA
tttgaactcgctgtgattcc

SEQ ID NO: 5623 - RNA, 20 nt, synthetic construct
  source 1..20: mol_type = other RNA
ctcgctgtgattccaggttt

SEQ ID NO: 5624 - RNA, 20 nt, synthetic construct
  source 1..20: mol_type = other RNA
gttttggagagccctcccct

SEQ ID NO: 5625 - RNA, 20 nt, synthetic construct
  source 1..20: mol_type = other RNA
ggggagggctctccaaaacc

SEQ ID NO: 5626 - RNA, 20 nt, synthetic construct
  source 1..20: mol_type = other RNA
ggatgtcgactcctagggga

SEQ ID NO: 5627 - RNA, 20 nt, synthetic construct
  source 1..20: mol_type = other RNA
gggatgtcgactcctagggg

SEQ ID NO: 5628 - RNA, 20 nt, synthetic construct
  source 1..20: mol_type = other RNA
tgtgggatgtcgactcctag

SEQ ID NO: 5629 - RNA, 20 nt, synthetic construct
  source 1..20: mol_type = other RNA
ttgtgggatgtcgactccta

SEQ ID NO: 5630 - RNA, 20 nt, synthetic construct
  source 1..20: mol_type = other RNA
cttgtgggatgtcgactcct

SEQ ID NO: 5631 - RNA, 20 nt, synthetic construct
  source 1..20: mol_type = other RNA
tttgggactaatcagcttgt

SEQ ID NO: 5632 - RNA, 20 nt, synthetic construct
  source 1..20: mol_type = other RNA
gtttgggactaatcagcttg

SEQ ID NO: 5633 - RNA, 20 nt, synthetic construct
  source 1..20: mol_type = other RNA
ttagtcccaaacacatcccg

SEQ ID NO: 5634 - RNA, 20 nt, synthetic construct
  source 1..20: mol_type = other RNA
tagtcccaaacacatcccga

SEQ ID NO: 5635 - RNA, 20 nt, synthetic construct
  source 1..20: mol_type = other RNA
ggtgccctcgggatgtgttt

SEQ ID NO: 5636 - RNA, 20 nt, synthetic construct
  source 1..20: mol_type = other RNA
tggtgccctcgggatgtgtt

SEQ ID NO: 5637 - RNA, 20 nt, synthetic construct
  source 1..20: mol_type = other RNA
cgagggcaccatgcttcaag

SEQ ID NO: 5638 - RNA, 20 nt, synthetic construct
  source 1..20: mol_type = other RNA
tcttgaagcatggtgccctc

SEQ ID NO: 5639 - RNA, 20 nt, synthetic construct
  source 1..20: mol_type = other RNA
ctcttgaagcatggtgccct

SEQ ID NO: 5640 - RNA, 20 nt, synthetic construct
  source 1..20: mol_type = other RNA
caccatgcttcaagaggcat

SEQ ID NO: 5641 - RNA, 20 nt, synthetic construct
  source 1..20: mol_type = other RNA
catgcttcaagaggcattgg

SEQ ID NO: 5642 - RNA, 20 nt, synthetic construct
  source 1..20: mol_type = other RNA
atgcttcaagaggcattggc

SEQ ID NO: 5643 - RNA, 20 nt, synthetic construct
  source 1..20: mol_type = other RNA
cgccaatgcctcttgaagca

SEQ ID NO: 5644 - RNA, 20 nt, synthetic construct
  source 1..20: mol_type = other RNA
aagaggcattggcgggtctc

SEQ ID NO: 5645 - RNA, 20 nt, synthetic construct
  source 1..20: mol_type = other RNA
ggcattggcgggtctctgga

SEQ ID NO: 5646 - RNA, 20 nt, synthetic construct
  source 1..20: mol_type = other RNA
aaggcacgctttccacatga

SEQ ID NO: 5647 - RNA, 20 nt, synthetic construct
  source 1..20: mol_type = other RNA
gagtagacacatccatcatg

SEQ ID NO: 5648 - RNA, 20 nt, synthetic construct
  source 1..20: mol_type = other RNA
tgtctactcagtctattgtc

SEQ ID NO: 5649 - RNA, 20 nt, synthetic construct
  source 1..20: mol_type = other RNA
ctactcagtctattgtctgg

SEQ ID NO: 5650 - RNA, 20 nt, synthetic construct
  source 1..20: mol_type = other RNA
tactcagtctattgtctggt

SEQ ID NO: 5651 - RNA, 20 nt, synthetic construct
  source 1..20: mol_type = other RNA
agtctattgtctggtgggat

SEQ ID NO: 5652 - RNA, 20 nt, synthetic construct
  source 1..20: mol_type = other RNA
ctattgtctggtgggattgg

SEQ ID NO: 5653 - RNA, 20 nt, synthetic construct
  source 1..20: mol_type = other RNA
ttgtctggtgggattggtgg

SEQ ID NO: 5654 - RNA, 20 nt, synthetic construct
  source 1..20: mol_type = other RNA
gggattggtggaggtctttc

SEQ ID NO: 5655 - RNA, 20 nt, synthetic construct
  source 1..20: mol_type = other RNA
attggtggaggtctttcagg

SEQ ID NO: 5656 - RNA, 20 nt, synthetic construct
  source 1..20: mol_type = other RNA
ggtggaggtctttcaggtgg

SEQ ID NO: 5657 - RNA, 20 nt, synthetic construct
  source 1..20: mol_type = other RNA
ggaggtctttcaggtggcgg

SEQ ID NO: 5658 - RNA, 20 nt, synthetic construct
  source 1..20: mol_type = other RNA
ggtctttcaggtggcggtgg

SEQ ID NO: 5659 - RNA, 20 nt, synthetic construct
  source 1..20: mol_type = other RNA
ctttcaggtggcggtggagg

SEQ ID NO: 5660 - RNA, 20 nt, synthetic construct
  source 1..20: mol_type = other RNA
cggtggaggaggatctctta

SEQ ID NO: 5661 - RNA, 20 nt, synthetic construct
  source 1..20: mol_type = other RNA
ggtggaggaggatctcttaa

SEQ ID NO: 5662 - RNA, 20 nt, synthetic construct
  source 1..20: mol_type = other RNA
ggaggaggatctcttaaggg

SEQ ID NO: 5663 - RNA, 20 nt, synthetic construct
  source 1..20: mol_type = other RNA
ggaggatctcttaagggagg

SEQ ID NO: 5664 - RNA, 20 nt, synthetic construct
  source 1..20: mol_type = other RNA
ggatctcttaagggaggagg

SEQ ID NO: 5665 - RNA, 20 nt, synthetic construct
  source 1..20: mol_type = other RNA
cttaagggaggaggtggtgc

SEQ ID NO: 5666 - RNA, 20 nt, synthetic construct
  source 1..20: mol_type = other RNA
ttaagggaggaggtggtgct

SEQ ID NO: 5667 - RNA, 20 nt, synthetic construct
  source 1..20: mol_type = other RNA
ggaggaggtggtgctgggag

SEQ ID NO: 5668 - RNA, 20 nt, synthetic construct
  source 1..20: mol_type = other RNA
tcttgttttctcaccatgca

SEQ ID NO: 5669 - RNA, 20 nt, synthetic construct
  source 1..20: mol_type = other RNA
tctttagtcttctccttgca

SEQ ID NO: 5670 - RNA, 20 nt, synthetic construct
  source 1..20: mol_type = other RNA
taataaaattgatctacctt

SEQ ID NO: 5671 - RNA, 20 nt, synthetic construct
  source 1..20: mol_type = other RNA
tctacctttggtgaacccgt

SEQ ID NO: 5672 - RNA, 20 nt, synthetic construct
  source 1..20: mol_type = other RNA
ctacctttggtgaacccgtt

SEQ ID NO: 5673 - RNA, 20 nt, synthetic construct
  source 1..20: mol_type = other RNA
cagcccaacgggttcaccaa

SEQ ID NO: 5674 - RNA, 20 nt, synthetic construct
  source 1..20: mol_type = other RNA
tgaacccgttgggctgccac

SEQ ID NO: 5675 - RNA, 20 nt, synthetic construct
  source 1..20: mol_type = other RNA
gaacccgttgggctgccaca

SEQ ID NO: 5676 - RNA, 20 nt, synthetic construct
  source 1..20: mol_type = other RNA
tctccctgtggcagcccaac

SEQ ID NO: 5677 - RNA, 20 nt, synthetic construct
  source 1..20: mol_type = other RNA
atctccctgtggcagcccaa

SEQ ID NO: 5678 - RNA, 20 nt, synthetic construct
  source 1..20: mol_type = other RNA
ggcatagttagatctccctg

SEQ ID NO: 5679 - RNA, 20 nt, synthetic construct
  source 1..20: mol_type = other RNA
tgcctttctgaattagatcc

SEQ ID NO: 5680 - RNA, 20 nt, synthetic construct
  source 1..20: mol_type = other RNA
ttctgaattagatccaggcg

SEQ ID NO: 5681 - RNA, 20 nt, synthetic construct
  source 1..20: mol_type = other RNA
cgcctggatctaattcagaa

SEQ ID NO: 5682 - RNA, 20 nt, synthetic construct
  source 1..20: mol_type = other RNA
tgaattagatccaggcgagg

SEQ ID NO: 5683 - RNA, 20 nt, synthetic construct
  source 1..20: mol_type = other RNA
tagatccaggcgaggaggca

SEQ ID NO: 5684 - RNA, 20 nt, synthetic construct
  source 1..20: mol_type = other RNA
agatccaggcgaggaggcac

SEQ ID NO: 5685 - RNA, 20 nt, synthetic construct
  source 1..20: mol_type = other RNA
tccaggcgaggaggcacggg

SEQ ID NO: 5686 - RNA, 20 nt, synthetic construct
  source 1..20: mol_type = other RNA
ggcgaggaggcacgggtggc

SEQ ID NO: 5687 - RNA, 20 nt, synthetic construct
  source 1..20: mol_type = other RNA
gccacccgtgcctcctcgcc

SEQ ID NO: 5688 - RNA, 20 nt, synthetic construct
  source 1..20: mol_type = other RNA
acgggtggcaggcttagatg

SEQ ID NO: 5689 - RNA, 20 nt, synthetic construct
  source 1..20: mol_type = other RNA
cgggtggcaggcttagatgt

SEQ ID NO: 5690 - RNA, 20 nt, synthetic construct
  source 1..20: mol_type = other RNA
gcaggcttagatgtgggatc

SEQ ID NO: 5691 - RNA, 20 nt, synthetic construct
  source 1..20: mol_type = other RNA
cttagatgtgggatctggag

SEQ ID NO: 5692 - RNA, 20 nt, synthetic construct
  source 1..20: mol_type = other RNA
ttagatgtgggatctggagt

SEQ ID NO: 5693 - RNA, 20 nt, synthetic construct
  source 1..20: mol_type = other RNA
tgtgggatctggagtgggtc

SEQ ID NO: 5694 - RNA, 20 nt, synthetic construct
  source 1..20: mol_type = other RNA
atctggagtgggtcaggctg

SEQ ID NO: 5695 - RNA, 20 nt, synthetic construct
  source 1..20: mol_type = other RNA
caggctgtggctttcttctc

SEQ ID NO: 5696 - RNA, 20 nt, synthetic construct
  source 1..20: mol_type = other RNA
aggctgtggctttcttctct

SEQ ID NO: 5697 - RNA, 20 nt, synthetic construct
  source 1..20: mol_type = other RNA
gtggctttcttctctgggca

SEQ ID NO: 5698 - RNA, 20 nt, synthetic construct
  source 1..20: mol_type = other RNA
tggctttcttctctgggcaa

SEQ ID NO: 5699 - RNA, 20 nt, synthetic construct
  source 1..20: mol_type = other RNA
ggctttcttctctgggcaag

SEQ ID NO: 5700 - RNA, 20 nt, synthetic construct
  source 1..20: mol_type = other RNA
tcttctctgggcaaggggag

SEQ ID NO: 5701 - RNA, 20 nt, synthetic construct
  source 1..20: mol_type = other RNA
tgggcaaggggagaggatcc

SEQ ID NO: 5702 - RNA, 20 nt, synthetic construct
  source 1..20: mol_type = other RNA
gaggatcctggtgatgtgac

SEQ ID NO: 5703 - RNA, 20 nt, synthetic construct
  source 1..20: mol_type = other RNA
aactcaccagtcacatcacc

SEQ ID NO: 5704 - RNA, 20 nt, synthetic construct
  source 1..20: mol_type = other RNA
ttctgttctagtgcactgac

SEQ ID NO: 5705 - RNA, 20 nt, synthetic construct
  source 1..20: mol_type = other RNA
tgatcttaccagtcacatcc

SEQ ID NO: 5706 - RNA, 20 nt, synthetic construct
  source 1..20: mol_type = other RNA
cacatcctggactttgtctg

SEQ ID NO: 5707 - RNA, 20 nt, synthetic construct
  source 1..20: mol_type = other RNA
acatcctggactttgtctga

SEQ ID NO: 5708 - RNA, 20 nt, synthetic construct
  source 1..20: mol_type = other RNA
tgagccctcagacaaagtcc

SEQ ID NO: 5709 - RNA, 20 nt, synthetic construct
  source 1..20: mol_type = other RNA
acatcagatctaattatccc

SEQ ID NO: 5710 - RNA, 20 nt, synthetic construct
  source 1..20: mol_type = other RNA
tttcaagctgtcagaatcct

SEQ ID NO: 5711 - RNA, 20 nt, synthetic construct
  source 1..20: mol_type = other RNA
ttttcaagctgtcagaatcc

SEQ ID NO: 5712 - RNA, 20 nt, synthetic construct
  source 1..20: mol_type = other RNA
ttctgacagcttgaaaactc

SEQ ID NO: 5713 - RNA, 20 nt, synthetic construct
  source 1..20: mol_type = other RNA
ctcaggcaacgatacagact

SEQ ID NO: 5714 - RNA, 20 nt, synthetic construct
  source 1..20: mol_type = other RNA
tcaggcaacgatacagactt

SEQ ID NO: 5715 - RNA, 20 nt, synthetic construct
  source 1..20: mol_type = other RNA
atgtttctagttttaccttt

SEQ ID NO: 5716 - RNA, 20 nt, synthetic construct
  source 1..20: mol_type = other RNA
aaaggtaaaactagaaacat

SEQ ID NO: 5717 - RNA, 20 nt, synthetic construct
  source 1..20: mol_type = other RNA
gaaaggtaaaactagaaaca

SEQ ID NO: 5718 - RNA, 20 nt, synthetic construct
  source 1..20: mol_type = other RNA
tcggttggcaaacgtccgaa

SEQ ID NO: 5719 - RNA, 20 nt, synthetic construct
  source 1..20: mol_type = other RNA
tgccaaccgattcatcatca

SEQ ID NO: 5720 - RNA, 20 nt, synthetic construct
  source 1..20: mol_type = other RNA
gtccttgatgatgaatcggt

SEQ ID NO: 5721 - RNA, 20 nt, synthetic construct
  source 1..20: mol_type = other RNA
aggagtccttgatgatgaat

SEQ ID NO: 5722 - RNA, 20 nt, synthetic construct
  source 1..20: mol_type = other RNA
tgcagcatcattgacccctt

SEQ ID NO: 5723 - RNA, 20 nt, synthetic construct
  source 1..20: mol_type = other RNA
gtcaatgatgctgcaacacc

SEQ ID NO: 5724 - RNA, 20 nt, synthetic construct
  source 1..20: mol_type = other RNA
atcaaaggggtccacgatta

SEQ ID NO: 5725 - RNA, 20 nt, synthetic construct
  source 1..20: mol_type = other RNA
tcaaaggggtccacgattat

SEQ ID NO: 5726 - RNA, 20 nt, synthetic construct
  source 1..20: mol_type = other RNA
aggaactgagcccataatcg

SEQ ID NO: 5727 - RNA, 20 nt, synthetic construct
  source 1..20: mol_type = other RNA
tttatttcacaacgacagaa

SEQ ID NO: 5728 - RNA, 20 nt, synthetic construct
  source 1..20: mol_type = other RNA
ttatttcacaacgacagaaa

SEQ ID NO: 5729 - RNA, 20 nt, synthetic construct
  source 1..20: mol_type = other RNA
ttctgtcgttgtgaaataaa

SEQ ID NO: 5730 - RNA, 20 nt, synthetic construct
  source 1..20: mol_type = other RNA
gtttaggagtcggatggtca

SEQ ID NO: 5731 - RNA, 20 nt, synthetic construct
  source 1..20: mol_type = other RNA
tgtttaggagtcggatggtc

SEQ ID NO: 5732 - RNA, 20 nt, synthetic construct
  source 1..20: mol_type = other RNA
ctatttgtttaggagtcgga

SEQ ID NO: 5733 - RNA, 20 nt, synthetic construct
  source 1..20: mol_type = other RNA
ttttctatttgtttaggagt

SEQ ID NO: 5734 - RNA, 20 nt, synthetic construct
  source 1..20: mol_type = other RNA
ctaaacaaatagaaaatgca

SEQ ID NO: 5735 - RNA, 20 nt, synthetic construct
  source 1..20: mol_type = other RNA
catgcattttctatttgttt

SEQ ID NO: 5736 - RNA, 20 nt, synthetic construct
  source 1..20: mol_type = other RNA
ctatatttcatgtagctatg

SEQ ID NO: 5737 - RNA, 20 nt, synthetic construct
  source 1..20: mol_type = other RNA
tatgtttaaaaaaagatttg

SEQ ID NO: 5738 - RNA, 20 nt, synthetic construct
  source 1..20: mol_type = other RNA
ttaaacatagcaattataac

SEQ ID NO: 5739 - RNA, 20 nt, synthetic construct
  source 1..20: mol_type = other RNA
tatataaatgcactgagaat

SEQ ID NO: 5740 - RNA, 20 nt, synthetic construct
  source 1..20: mol_type = other RNA
taaatgcactgagaataggt

SEQ ID NO: 5741 - RNA, 20 nt, synthetic construct
  source 1..20: mol_type = other RNA
tgctttgaaaattcttggta

SEQ ID NO: 5742 - RNA, 20 nt, synthetic construct
  source 1..20: mol_type = other RNA
tactgtgctttgaaaattct

SEQ ID NO: 5743 - RNA, 20 nt, synthetic construct
  source 1..20: mol_type = other RNA
cacagaaactcaataacttc

SEQ ID NO: 5744 - RNA, 20 nt, synthetic construct
  source 1..20: mol_type = other RNA
agaagttattgagtttctgt

SEQ ID NO: 5745 - RNA, 20 nt, synthetic construct
  source 1..20: mol_type = other RNA
cagaagttattgagtttctg

SEQ ID NO: 5746 - RNA, 20 nt, synthetic construct
  source 1..20: mol_type = other RNA
aaagaacgaatgaaagaata

SEQ ID NO: 5747 - RNA, 20 nt, synthetic construct
  source 1..20: mol_type = other RNA
aggtataatcattagcaaca

SEQ ID NO: 5748 - RNA, 20 nt, synthetic construct
  source 1..20: mol_type = other RNA
attatacctgccatgccgta

SEQ ID NO: 5749 - RNA, 20 nt, synthetic construct
  source 1..20: mol_type = other RNA
ctgccatgccgtaaggcaag

SEQ ID NO: 5750 - RNA, 20 nt, synthetic construct
  source 1..20: mol_type = other RNA
ctcttgccttacggcatggc

SEQ ID NO: 5751 - RNA, 20 nt, synthetic construct
  source 1..20: mol_type = other RNA
gcacctcttgccttacggca

SEQ ID NO: 5752 - RNA, 20 nt, synthetic construct
  source 1..20: mol_type = other RNA
gatgtgcacctcttgcctta

SEQ ID NO: 5753 - RNA, 20 nt, synthetic construct
  source 1..20: mol_type = other RNA
gtgcacatcaaatgcccaca

SEQ ID NO: 5754 - RNA, 20 nt, synthetic construct
  source 1..20: mol_type = other RNA
atgtcaagattgagccttgt

SEQ ID NO: 5755 - RNA, 20 nt, synthetic construct
  source 1..20: mol_type = other RNA
gatgtcaagattgagccttg

SEQ ID NO: 5756 - RNA, 20 nt, synthetic construct
  source 1..20: mol_type = other RNA
aatcttacagagctgaaaag

SEQ ID NO: 5757 - RNA, 20 nt, synthetic construct
  source 1..20: mol_type = other RNA
tatgaattatattgtgaaat

SEQ ID NO: 5758 - RNA, 20 nt, synthetic construct
  source 1..20: mol_type = other RNA
atatgaattatattgtgaaa

SEQ ID NO: 5759 - RNA, 20 nt, synthetic construct
  source 1..20: mol_type = other RNA
aatataattcatattgttcc

SEQ ID NO: 5760 - RNA, 20 nt, synthetic construct
  source 1..20: mol_type = other RNA
ttcatattgttcctggaatt

SEQ ID NO: 5761 - RNA, 20 nt, synthetic construct
  source 1..20: mol_type = other RNA
tcatattgttcctggaattt

SEQ ID NO: 5762 - RNA, 20 nt, synthetic construct
  source 1..20: mol_type = other RNA
catattgttcctggaatttg

SEQ ID NO: 5763 - RNA, 20 nt, synthetic construct
  source 1..20: mol_type = other RNA
attgttcctggaatttgggg

SEQ ID NO: 5764 - RNA, 20 nt, synthetic construct
  source 1..20: mol_type = other RNA
gttcctggaatttggggagg

SEQ ID NO: 5765 - RNA, 20 nt, synthetic construct
  source 1..20: mol_type = other RNA
ttcctggaatttggggagga

SEQ ID NO: 5766 - RNA, 20 nt, synthetic construct
  source 1..20: mol_type = other RNA
ctccctcctccccaaattcc

SEQ ID NO: 5767 - RNA, 20 nt, synthetic construct
  source 1..20: mol_type = other RNA
ttacctgtgtaacttttata

SEQ ID NO: 5768 - RNA, 20 nt, synthetic construct
  source 1..20: mol_type = other RNA
atataaaagttacacaggta

SEQ ID NO: 5769 - RNA, 20 nt, synthetic construct
  source 1..20: mol_type = other RNA
gtaacttttatatggtcatg

SEQ ID NO: 5770 - RNA, 20 nt, synthetic construct
  source 1..20: mol_type = other RNA
tttatatggtcatgaggtgt

SEQ ID NO: 5771 - RNA, 20 nt, synthetic construct
  source 1..20: mol_type = other RNA
tcacataatccagttaaatc

SEQ ID NO: 5772 - RNA, 20 nt, synthetic construct
  source 1..20: mol_type = other RNA
agttataatcctgatttaac

SEQ ID NO: 5773 - RNA, 20 nt, synthetic construct
  source 1..20: mol_type = other RNA
ggattataactcctcccatc

SEQ ID NO: 5774 - RNA, 20 nt, synthetic construct
  source 1..20: mol_type = other RNA
gttatctttatcctgatggg

SEQ ID NO: 5775 - RNA, 20 nt, synthetic construct
  source 1..20: mol_type = other RNA
tcagttatctttatcctgat

SEQ ID NO: 5776 - RNA, 20 nt, synthetic construct
  source 1..20: mol_type = other RNA
ttcagttatctttatcctga

SEQ ID NO: 5777 - RNA, 20 nt, synthetic construct
  source 1..20: mol_type = other RNA
taagtatgagaaatggaagt

SEQ ID NO: 5778 - RNA, 20 nt, synthetic construct
  source 1..20: mol_type = other RNA
aggattgtaagtatgagaaa

SEQ ID NO: 5779 - RNA, 20 nt, synthetic construct
  source 1..20: mol_type = other RNA
cttccctgctgccatcaatc

SEQ ID NO: 5780 - RNA, 20 nt, synthetic construct
  source 1..20: mol_type = other RNA
ttccctgctgccatcaatca

SEQ ID NO: 5781 - RNA, 20 nt, synthetic construct
  source 1..20: mol_type = other RNA
ctgattgatggcagcaggga

SEQ ID NO: 5782 - RNA, 20 nt, synthetic construct
  source 1..20: mol_type = other RNA
agccctgattgatggcagca

SEQ ID NO: 5783 - RNA, 20 nt, synthetic construct
  source 1..20: mol_type = other RNA
aagccctgattgatggcagc

SEQ ID NO: 5784 - RNA, 20 nt, synthetic construct
  source 1..20: mol_type = other RNA
atcaatcagggcttgaaata

SEQ ID NO: 5785 - RNA, 20 nt, synthetic construct
  source 1..20: mol_type = other RNA
tcaatcagggcttgaaataa

SEQ ID NO: 5786 - RNA, 20 nt, synthetic construct
  source 1..20: mol_type = other RNA
ttatttcaagccctgattga

SEQ ID NO: 5787 - RNA, 20 nt, synthetic construct
  source 1..20: mol_type = other RNA
tgaaataagggcttgttatg

SEQ ID NO: 5788 - RNA, 20 nt, synthetic construct
  source 1..20: mol_type = other RNA
taagggcttgttatgaggta

SEQ ID NO: 5789 - RNA, 20 nt, synthetic construct
  source 1..20: mol_type = other RNA
atccccagtcacatagccaa

SEQ ID NO: 5790 - RNA, 20 nt, synthetic construct
  source 1..20: mol_type = other RNA
ttggctatgtgactggggat

SEQ ID NO: 5791 - RNA, 20 nt, synthetic construct
  source 1..20: mol_type = other RNA
attggctatgtgactgggga

SEQ ID NO: 5792 - RNA, 20 nt, synthetic construct
  source 1..20: mol_type = other RNA
ggccattggctatgtgactg

SEQ ID NO: 5793 - RNA, 20 nt, synthetic construct
  source 1..20: mol_type = other RNA
gggccattggctatgtgact

SEQ ID NO: 5794 - RNA, 20 nt, synthetic construct
  source 1..20: mol_type = other RNA
tgggccattggctatgtgac

SEQ ID NO: 5795 - RNA, 20 nt, synthetic construct
  source 1..20: mol_type = other RNA
cgattgggacagtgggccat

SEQ ID NO: 5796 - RNA, 20 nt, synthetic construct
  source 1..20: mol_type = other RNA
ttgcactcgattgggacagt

SEQ ID NO: 5797 - RNA, 20 nt, synthetic construct
  source 1..20: mol_type = other RNA
gttgcactcgattgggacag

SEQ ID NO: 5798 - RNA, 20 nt, synthetic construct
  source 1..20: mol_type = other RNA
ccaatcgagtgcaacttaac

SEQ ID NO: 5799 - RNA, 20 nt, synthetic construct
  source 1..20: mol_type = other RNA
cggttaagttgcactcgatt

SEQ ID NO: 5800 - RNA, 20 nt, synthetic construct
  source 1..20: mol_type = other RNA
ccggttaagttgcactcgat

SEQ ID NO: 5801 - RNA, 20 nt, synthetic construct
  source 1..20: mol_type = other RNA
tgttttgcagctatattttc

SEQ ID NO: 5802 - RNA, 20 nt, synthetic construct
  source 1..20: mol_type = other RNA
tgctaaaaagtcttaccttc

SEQ ID NO: 5803 - RNA, 20 nt, synthetic construct
  source 1..20: mol_type = other RNA
gctaaaaagtcttaccttcc

SEQ ID NO: 5804 - RNA, 20 nt, synthetic construct
  source 1..20: mol_type = other RNA
aaagtcttaccttccgggtt

SEQ ID NO: 5805 - RNA, 20 nt, synthetic construct
  source 1..20: mol_type = other RNA
aatatagcaccaaacccgga

SEQ ID NO: 5806 - RNA, 20 nt, synthetic construct
  source 1..20: mol_type = other RNA
cagaaatatagcaccaaacc

SEQ ID NO: 5807 - RNA, 20 nt, synthetic construct
  source 1..20: mol_type = other RNA
gtgagaaatgccatgtaacc

SEQ ID NO: 5808 - RNA, 20 nt, synthetic construct
  source 1..20: mol_type = other RNA
tgtgacacatccaggttaca

SEQ ID NO: 5809 - RNA, 20 nt, synthetic construct
  source 1..20: mol_type = other RNA
ttcttagctgtgacacatcc

SEQ ID NO: 5810 - RNA, 20 nt, synthetic construct
  source 1..20: mol_type = other RNA
ttccgcaaaatagagcccca

SEQ ID NO: 5811 - RNA, 20 nt, synthetic construct
  source 1..20: mol_type = other RNA
ggggctctattttgcggaat

SEQ ID NO: 5812 - RNA, 20 nt, synthetic construct
  source 1..20: mol_type = other RNA
agccttggggctctattttg

SEQ ID NO: 5813 - RNA, 20 nt, synthetic construct
  source 1..20: mol_type = other RNA
ttttttattttttagccttg

SEQ ID NO: 5814 - RNA, 20 nt, synthetic construct
  source 1..20: mol_type = other RNA
tttttttattttttagcctt

SEQ ID NO: 5815 - RNA, 20 nt, synthetic construct
  source 1..20: mol_type = other RNA
atttttttattttttagcct

SEQ ID NO: 5816 - RNA, 20 nt, synthetic construct
  source 1..20: mol_type = other RNA
gaagtgagtatatttttttg

SEQ ID NO: 5817 - RNA, 20 nt, synthetic construct
  source 1..20: mol_type = other RNA
acttcctagaatgagcagtt

SEQ ID NO: 5818 - RNA, 20 nt, synthetic construct
  source 1..20: mol_type = other RNA
taaacctaactgctcattct

SEQ ID NO: 5819 - RNA, 20 nt, synthetic construct
  source 1..20: mol_type = other RNA
tgagcagttaggtttaatgt

SEQ ID NO: 5820 - RNA, 20 nt, synthetic construct
  source 1..20: mol_type = other RNA
ttttactctcttccttgaca

SEQ ID NO: 5821 - RNA, 20 nt, synthetic construct
  source 1..20: mol_type = other RNA
tttgcttcttcaccttgtca

SEQ ID NO: 5822 - RNA, 20 nt, synthetic construct
  source 1..20: mol_type = other RNA
tatcagaaacctttaaagaa

SEQ ID NO: 5823 - RNA, 20 nt, synthetic construct
  source 1..20: mol_type = other RNA
gaaacctttaaagaaaggag

SEQ ID NO: 5824 - RNA, 20 nt, synthetic construct
  source 1..20: mol_type = other RNA
ggaacctctcctttctttaa

SEQ ID NO: 5825 - RNA, 20 nt, synthetic construct
  source 1..20: mol_type = other RNA
tgatattggtcattttataa

SEQ ID NO: 5826 - RNA, 20 nt, synthetic construct
  source 1..20: mol_type = other RNA
tatttttaccaggctgtttc

SEQ ID NO: 5827 - RNA, 20 nt, synthetic construct
  source 1..20: mol_type = other RNA
ttgaatttgatatttttacc

SEQ ID NO: 5828 - RNA, 20 nt, synthetic construct
  source 1..20: mol_type = other RNA
attttagagccattgcttcc

SEQ ID NO: 5829 - RNA, 20 nt, synthetic construct
  source 1..20: mol_type = other RNA
tagctctggcctggaagcaa

SEQ ID NO: 5830 - RNA, 20 nt, synthetic construct
  source 1..20: mol_type = other RNA
cttccaggccagagctaatc

SEQ ID NO: 5831 - RNA, 20 nt, synthetic construct
  source 1..20: mol_type = other RNA
ccaggccagagctaatctgg

SEQ ID NO: 5832 - RNA, 20 nt, synthetic construct
  source 1..20: mol_type = other RNA
ccaccagattagctctggcc

SEQ ID NO: 5833 - RNA, 20 nt, synthetic construct
  source 1..20: mol_type = other RNA
gaggtccaccagattagctc

SEQ ID NO: 5834 - RNA, 20 nt, synthetic construct
  source 1..20: mol_type = other RNA
taatctggtggacctcatga

SEQ ID NO: 5835 - RNA, 20 nt, synthetic construct
  source 1..20: mol_type = other RNA
attcagacagtgccttcatg

SEQ ID NO: 5836 - RNA, 20 nt, synthetic construct
  source 1..20: mol_type = other RNA
cactgtctgaatactttcca

SEQ ID NO: 5837 - RNA, 20 nt, synthetic construct
  source 1..20: mol_type = other RNA
tggtacgatagttctgtgca

SEQ ID NO: 5838 - RNA, 20 nt, synthetic construct
  source 1..20: mol_type = other RNA
tgcacagaactatcgtacca

SEQ ID NO: 5839 - RNA, 20 nt, synthetic construct
  source 1..20: mol_type = other RNA
tacgatagttctgtgcaagg

SEQ ID NO: 5840 - RNA, 20 nt, synthetic construct
  source 1..20: mol_type = other RNA
tctgtgcaaggtggaaaaaa

SEQ ID NO: 5841 - RNA, 20 nt, synthetic construct
  source 1..20: mol_type = other RNA
ctgtgcaaggtggaaaaaaa

SEQ ID NO: 5842 - RNA, 20 nt, synthetic construct
  source 1..20: mol_type = other RNA
tgtgaaaattcatgctttct

SEQ ID NO: 5843 - RNA, 20 nt, synthetic construct
  source 1..20: mol_type = other RNA
gtgtgaaaattcatgctttc

SEQ ID NO: 5844 - RNA, 20 nt, synthetic construct
  source 1..20: mol_type = other RNA
ttttgcagaagtttaaatgg

SEQ ID NO: 5845 - RNA, 20 nt, synthetic construct
  source 1..20: mol_type = other RNA
tctttttgcagaagtttaaa

SEQ ID NO: 5846 - RNA, 20 nt, synthetic construct
  source 1..20: mol_type = other RNA
aaacttctgcaaaaagacag

SEQ ID NO: 5847 - RNA, 20 nt, synthetic construct
  source 1..20: mol_type = other RNA
cttctgcaaaaagacagtgg

SEQ ID NO: 5848 - RNA, 20 nt, synthetic construct
  source 1..20: mol_type = other RNA
tgcttcatctctaaaggaag

SEQ ID NO: 5849 - RNA, 20 nt, synthetic construct
  source 1..20: mol_type = other RNA
ctcatttgcttcatctctaa

SEQ ID NO: 5850 - RNA, 20 nt, synthetic construct
  source 1..20: mol_type = other RNA
tttacaaatgtagaaatttc

SEQ ID NO: 5851 - RNA, 20 nt, synthetic construct
  source 1..20: mol_type = other RNA
ttacaaatgtagaaatttca

SEQ ID NO: 5852 - RNA, 20 nt, synthetic construct
  source 1..20: mol_type = other RNA
atgtagaaatttcagggtgc

SEQ ID NO: 5853 - RNA, 20 nt, synthetic construct
  source 1..20: mol_type = other RNA
tcagggtgctggcagagacc

SEQ ID NO: 5854 - RNA, 20 nt, synthetic construct
  source 1..20: mol_type = other RNA
cagggtgctggcagagacct

SEQ ID NO: 5855 - RNA, 20 nt, synthetic construct
  source 1..20: mol_type = other RNA
agagacctgggaagaagaaa

SEQ ID NO: 5856 - RNA, 20 nt, synthetic construct
  source 1..20: mol_type = other RNA
gagacctgggaagaagaaaa

SEQ ID NO: 5857 - RNA, 20 nt, synthetic construct
  source 1..20: mol_type = other RNA
tcttcccttttcttcttccc

SEQ ID NO: 5858 - RNA, 20 nt, synthetic construct
  source 1..20: mol_type = other RNA
gaattctggagaaagttttt

SEQ ID NO: 5859 - RNA, 20 nt, synthetic construct
  source 1..20: mol_type = other RNA
aagcagatgctgctgaattc

SEQ ID NO: 5860 - RNA, 20 nt, synthetic construct
  source 1..20: mol_type = other RNA
tgatacgaaagttatctccc

SEQ ID NO: 5861 - RNA, 20 nt, synthetic construct
  source 1..20: mol_type = other RNA
atctccctggaattgaccat

SEQ ID NO: 5862 - RNA, 20 nt, synthetic construct
  source 1..20: mol_type = other RNA
tctccctggaattgaccatt

SEQ ID NO: 5863 - RNA, 20 nt, synthetic construct
  source 1..20: mol_type = other RNA
tttcccaatggtcaattcca

SEQ ID NO: 5864 - RNA, 20 nt, synthetic construct
  source 1..20: mol_type = other RNA
ctttcccaatggtcaattcc

SEQ ID NO: 5865 - RNA, 20 nt, synthetic construct
  source 1..20: mol_type = other RNA
atcaaagcaatctttcccaa

SEQ ID NO: 5866 - RNA, 20 nt, synthetic construct
  source 1..20: mol_type = other RNA
ccagcatgtgactgaagata

SEQ ID NO: 5867 - RNA, 20 nt, synthetic construct
  source 1..20: mol_type = other RNA
cagcatgtgactgaagataa

SEQ ID NO: 5868 - RNA, 20 nt, synthetic construct
  source 1..20: mol_type = other RNA
ccttatcttcagtcacatgc

SEQ ID NO: 5869 - RNA, 20 nt, synthetic construct
  source 1..20: mol_type = other RNA
ttttgtgagatttcgtctgt

SEQ ID NO: 5870 - RNA, 20 nt, synthetic construct
  source 1..20: mol_type = other RNA
agatttcgtctgtaggcaca

SEQ ID NO: 5871 - RNA, 20 nt, synthetic construct
  source 1..20: mol_type = other RNA
gatttcgtctgtaggcacaa

SEQ ID NO: 5872 - RNA, 20 nt, synthetic construct
  source 1..20: mol_type = other RNA
aatcccaaacttaagcttac

SEQ ID NO: 5873 - RNA, 20 nt, synthetic construct
  source 1..20: mol_type = other RNA
acaccagtaagcttaagttt

SEQ ID NO: 5874 - RNA, 20 nt, synthetic construct
  source 1..20: mol_type = other RNA
aacaccagtaagcttaagtt

SEQ ID NO: 5875 - RNA, 20 nt, synthetic construct
  source 1..20: mol_type = other RNA
ttggggaatgctgaggcttc

SEQ ID NO: 5876 - RNA, 20 nt, synthetic construct
  source 1..20: mol_type = other RNA
ctcagcattccccaaactcc

SEQ ID NO: 5877 - RNA, 20 nt, synthetic construct
  source 1..20: mol_type = other RNA
ctggagtttggggaatgctg

SEQ ID NO: 5878 - RNA, 20 nt, synthetic construct
  source 1..20: mol_type = other RNA
gcttataaacctggagtttg

SEQ ID NO: 5879 - RNA, 20 nt, synthetic construct
  source 1..20: mol_type = other RNA
agcttataaacctggagttt

SEQ ID NO: 5880 - RNA, 20 nt, synthetic construct
  source 1..20: mol_type = other RNA
cagcttataaacctggagtt

SEQ ID NO: 5881 - RNA, 20 nt, synthetic construct
  source 1..20: mol_type = other RNA
gatttgacagcttataaacc

SEQ ID NO: 5882 - RNA, 20 nt, synthetic construct
  source 1..20: mol_type = other RNA
gactgcagaaggagctcagg

SEQ ID NO: 5883 - RNA, 20 nt, synthetic construct
  source 1..20: mol_type = other RNA
caggactgcagaaggagctc

SEQ ID NO: 5884 - RNA, 20 nt, synthetic construct
  source 1..20: mol_type = other RNA
agagtgagcaggactgcaga

SEQ ID NO: 5885 - RNA, 20 nt, synthetic construct
  source 1..20: mol_type = other RNA
gcagtcctgctcactcttca

SEQ ID NO: 5886 - RNA, 20 nt, synthetic construct
  source 1..20: mol_type = other RNA
tggatccttgaagagtgagc

SEQ ID NO: 5887 - RNA, 20 nt, synthetic construct
  source 1..20: mol_type = other RNA
cactcttcaaggatccatgt

SEQ ID NO: 5888 - RNA, 20 nt, synthetic construct
  source 1..20: mol_type = other RNA
actcttcaaggatccatgta

SEQ ID NO: 5889 - RNA, 20 nt, synthetic construct
  source 1..20: mol_type = other RNA
cttcaaggatccatgtaggg

SEQ ID NO: 5890 - RNA, 20 nt, synthetic construct
  source 1..20: mol_type = other RNA
ttcaaggatccatgtagggt

SEQ ID NO: 5891 - RNA, 20 nt, synthetic construct
  source 1..20: mol_type = other RNA
tcaaggatccatgtagggtg

SEQ ID NO: 5892 - RNA, 20 nt, synthetic construct
  source 1..20: mol_type = other RNA
tatcaggaccccaccctaca

SEQ ID NO: 5893 - RNA, 20 nt, synthetic construct
  source 1..20: mol_type = other RNA
agtgacttgtctttcttatc

SEQ ID NO: 5894 - RNA, 20 nt, synthetic construct
  source 1..20: mol_type = other RNA
ctaaaggcaaaaaaaatggt

SEQ ID NO: 5895 - RNA, 20 nt, synthetic construct
  source 1..20: mol_type = other RNA
tcttctaaaggcaaaaaaaa

SEQ ID NO: 5896 - RNA, 20 nt, synthetic construct
  source 1..20: mol_type = other RNA
ttgcctttagaagatcacaa

SEQ ID NO: 5897 - RNA, 20 nt, synthetic construct
  source 1..20: mol_type = other RNA
ttaccattgtgatcttctaa

SEQ ID NO: 5898 - RNA, 20 nt, synthetic construct
  source 1..20: mol_type = other RNA
ggtaattcacaaagaactgc

SEQ ID NO: 5899 - RNA, 20 nt, synthetic construct
  source 1..20: mol_type = other RNA
aaagaactgctggcagagat

SEQ ID NO: 5900 - RNA, 20 nt, synthetic construct
  source 1..20: mol_type = other RNA
aagaactgctggcagagata

SEQ ID NO: 5901 - RNA, 20 nt, synthetic construct
  source 1..20: mol_type = other RNA
gaagaatatttcagatgttt

SEQ ID NO: 5902 - RNA, 20 nt, synthetic construct
  source 1..20: mol_type = other RNA
aagactctttaaagaaggca

SEQ ID NO: 5903 - RNA, 20 nt, synthetic construct
  source 1..20: mol_type = other RNA
cactgagttgggcaagtttc

SEQ ID NO: 5904 - RNA, 20 nt, synthetic construct
  source 1..20: mol_type = other RNA
cgtaaatgctgatatgtatc

SEQ ID NO: 5905 - RNA, 20 nt, synthetic construct
  source 1..20: mol_type = other RNA
gctatttttcaactgaagtt

SEQ ID NO: 5906 - RNA, 20 nt, synthetic construct
  source 1..20: mol_type = other RNA
ctatttttcaactgaagttt

SEQ ID NO: 5907 - RNA, 20 nt, synthetic construct
  source 1..20: mol_type = other RNA
tcaactgaagtttgggattt

SEQ ID NO: 5908 - RNA, 20 nt, synthetic construct
  source 1..20: mol_type = other RNA
ttatttttatctttgttttt

SEQ ID NO: 5909 - RNA, 20 nt, synthetic construct
  source 1..20: mol_type = other RNA
gagcttccaagtcttctcca

SEQ ID NO: 5910 - RNA, 20 nt, synthetic construct
  source 1..20: mol_type = other RNA
ggagaagacttggaagctca

SEQ ID NO: 5911 - RNA, 20 nt, synthetic construct
  source 1..20: mol_type = other RNA
gatgctattcaggatgcagt

SEQ ID NO: 5912 - RNA, 20 nt, synthetic construct
  source 1..20: mol_type = other RNA
gggtattattgatgctattc

SEQ ID NO: 5913 - RNA, 20 nt, synthetic construct
  source 1..20: mol_type = other RNA
tacccaaaattcgacctttt

SEQ ID NO: 5914 - RNA, 20 nt, synthetic construct
  source 1..20: mol_type = other RNA
acccaaaattcgaccttttc

SEQ ID NO: 5915 - RNA, 20 nt, synthetic construct
  source 1..20: mol_type = other RNA
agaaaccctggtggtcgagg

SEQ ID NO: 5916 - RNA, 20 nt, synthetic construct
  source 1..20: mol_type = other RNA
ggcagaaaccctggtggtcg

SEQ ID NO: 5917 - RNA, 20 nt, synthetic construct
  source 1..20: mol_type = other RNA
atgaatggcagaaaccctgg

SEQ ID NO: 5918 - RNA, 20 nt, synthetic construct
  source 1..20: mol_type = other RNA
tcaatgaatggcagaaaccc

SEQ ID NO: 5919 - RNA, 20 nt, synthetic construct
  source 1..20: mol_type = other RNA
cattcattgagtttgccatc

SEQ ID NO: 5920 - RNA, 20 nt, synthetic construct
  source 1..20: mol_type = other RNA
cagatggcaaactcaatgaa

SEQ ID NO: 5921 - RNA, 20 nt, synthetic construct
  source 1..20: mol_type = other RNA
tggaattttagttctttaaa

SEQ ID NO: 5922 - RNA, 20 nt, synthetic construct
  source 1..20: mol_type = other RNA
gttcgtgtgtccgtacttgg

SEQ ID NO: 5923 - RNA, 20 nt, synthetic construct
  source 1..20: mol_type = other RNA
ggtgttcgtgtgtccgtact

SEQ ID NO: 5924 - RNA, 20 nt, synthetic construct
  source 1..20: mol_type = other RNA
cacctttctttaaatcaacg

SEQ ID NO: 5925 - RNA, 20 nt, synthetic construct
  source 1..20: mol_type = other RNA
caccgcgttgatttaaagaa

SEQ ID NO: 5926 - RNA, 20 nt, synthetic construct
  source 1..20: mol_type = other RNA
gttaatttcatttggttctt

SEQ ID NO: 5927 - RNA, 20 nt, synthetic construct
  source 1..20: mol_type = other RNA
tgttaatttcatttggttct

SEQ ID NO: 5928 - RNA, 20 nt, synthetic construct
  source 1..20: mol_type = other RNA
atttgtgtgttaatttcatt

SEQ ID NO: 5929 - RNA, 20 nt, synthetic construct
  source 1..20: mol_type = other RNA
tctcttttctcttttcaaat

SEQ ID NO: 5930 - RNA, 20 nt, synthetic construct
  source 1..20: mol_type = other RNA
ttctcttttctcttttcaaa

SEQ ID NO: 5931 - RNA, 20 nt, synthetic construct
  source 1..20: mol_type = other RNA
aaagagaaaaatgacaagag

SEQ ID NO: 5932 - RNA, 20 nt, synthetic construct
  source 1..20: mol_type = other RNA
aaaaatgacaagagcggcca

SEQ ID NO: 5933 - RNA, 20 nt, synthetic construct
  source 1..20: mol_type = other RNA
tgacaagagcggccacggaa

SEQ ID NO: 5934 - RNA, 20 nt, synthetic construct
  source 1..20: mol_type = other RNA
caagagcggccacggaaagg

SEQ ID NO: 5935 - RNA, 20 nt, synthetic construct
  source 1..20: mol_type = other RNA
aagtgaactcctcctttccg

SEQ ID NO: 5936 - RNA, 20 nt, synthetic construct
  source 1..20: mol_type = other RNA
aaaggaggagttcacttctc

SEQ ID NO: 5937 - RNA, 20 nt, synthetic construct
  source 1..20: mol_type = other RNA
ttgggttgagggcagaggcg

SEQ ID NO: 5938 - RNA, 20 nt, synthetic construct
  source 1..20: mol_type = other RNA
aagctttgggttgagggcag

SEQ ID NO: 5939 - RNA, 20 nt, synthetic construct
  source 1..20: mol_type = other RNA
tcaacccaaagctttgtttc

SEQ ID NO: 5940 - RNA, 20 nt, synthetic construct
  source 1..20: mol_type = other RNA
gaaacaaagctttgggttga

SEQ ID NO: 5941 - RNA, 20 nt, synthetic construct
  source 1..20: mol_type = other RNA
tgaaacaaagctttgggttg

SEQ ID NO: 5942 - RNA, 20 nt, synthetic construct
  source 1..20: mol_type = other RNA
gcgtcctgaaacaaagcttt

SEQ ID NO: 5943 - RNA, 20 nt, synthetic construct
  source 1..20: mol_type = other RNA
ggcgtcctgaaacaaagctt

SEQ ID NO: 5944 - RNA, 20 nt, synthetic construct
  source 1..20: mol_type = other RNA
cctgtgtcccttccctgctc

SEQ ID NO: 5945 - RNA, 20 nt, synthetic construct
  source 1..20: mol_type = other RNA
cctgagcagggaagggacac

SEQ ID NO: 5946 - RNA, 20 nt, synthetic construct
  source 1..20: mol_type = other RNA
tccctgctcaggccccttcc

SEQ ID NO: 5947 - RNA, 20 nt, synthetic construct
  source 1..20: mol_type = other RNA
gaaggggcctgagcagggaa

SEQ ID NO: 5948 - RNA, 20 nt, synthetic construct
  source 1..20: mol_type = other RNA
ggaaggggcctgagcaggga

SEQ ID NO: 5949 - RNA, 20 nt, synthetic construct
  source 1..20: mol_type = other RNA
gccgggaaggggcctgagca

SEQ ID NO: 5950 - RNA, 20 nt, synthetic construct
  source 1..20: mol_type = other RNA
ggccgggaaggggcctgagc

SEQ ID NO: 5951 - RNA, 20 nt, synthetic construct
  source 1..20: mol_type = other RNA
caggccccttcccggcccct

SEQ ID NO: 5952 - RNA, 20 nt, synthetic construct
  source 1..20: mol_type = other RNA
aggccccttcccggcccctc

SEQ ID NO: 5953 - RNA, 20 nt, synthetic construct
  source 1..20: mol_type = other RNA
agacccgaggggccgggaag

SEQ ID NO: 5954 - RNA, 20 nt, synthetic construct
  source 1..20: mol_type = other RNA
cagacccgaggggccgggaa

SEQ ID NO: 5955 - RNA, 20 nt, synthetic construct
  source 1..20: mol_type = other RNA
tcagacccgaggggccggga

SEQ ID NO: 5956 - RNA, 20 nt, synthetic construct
  source 1..20: mol_type = other RNA
gcccctcgggtctgagctgc

SEQ ID NO: 5957 - RNA, 20 nt, synthetic construct
  source 1..20: mol_type = other RNA
cagctcagacccgaggggcc

SEQ ID NO: 5958 - RNA, 20 nt, synthetic construct
  source 1..20: mol_type = other RNA
gcagctcagacccgaggggc

SEQ ID NO: 5959 - RNA, 20 nt, synthetic construct
  source 1..20: mol_type = other RNA
cctcgggtctgagctgcagg

SEQ ID NO: 5960 - RNA, 20 nt, synthetic construct
  source 1..20: mol_type = other RNA
tcctgcagctcagacccgag

SEQ ID NO: 5961 - RNA, 20 nt, synthetic construct
  source 1..20: mol_type = other RNA
gggtctgagctgcaggagga

SEQ ID NO: 5962 - RNA, 20 nt, synthetic construct
  source 1..20: mol_type = other RNA
cctcctgcagctcagacccg

SEQ ID NO: 5963 - RNA, 20 nt, synthetic construct
  source 1..20: mol_type = other RNA
gaggactgcagcaggcggcc

SEQ ID NO: 5964 - RNA, 20 nt, synthetic construct
  source 1..20: mol_type = other RNA
tgaggactgcagcaggcggc

SEQ ID NO: 5965 - RNA, 20 nt, synthetic construct
  source 1..20: mol_type = other RNA
gcggtgaggactgcagcagg

SEQ ID NO: 5966 - RNA, 20 nt, synthetic construct
  source 1..20: mol_type = other RNA
acggcggtgaggactgcagc

SEQ ID NO: 5967 - RNA, 20 nt, synthetic construct
  source 1..20: mol_type = other RNA
agtcctcaccgccgtctgcc

SEQ ID NO: 5968 - RNA, 20 nt, synthetic construct
  source 1..20: mol_type = other RNA
cgtccaggcagacggcggtg

SEQ ID NO: 5969 - RNA, 20 nt, synthetic construct
  source 1..20: mol_type = other RNA
gagggcgtccaggcagacgg

SEQ ID NO: 5970 - RNA, 20 nt, synthetic construct
  source 1..20: mol_type = other RNA
ggagagggcgtccaggcaga

SEQ ID NO: 5971 - RNA, 20 nt, synthetic construct
  source 1..20: mol_type = other RNA
gacgccctctccctcctccc

SEQ ID NO: 5972 - RNA, 20 nt, synthetic construct
  source 1..20: mol_type = other RNA
ggaggagggagagggcgtcc

SEQ ID NO: 5973 - RNA, 20 nt, synthetic construct
  source 1..20: mol_type = other RNA
tctccctcctccccggcctg

SEQ ID NO: 5974 - RNA, 20 nt, synthetic construct
  source 1..20: mol_type = other RNA
ctccctcctccccggcctgc

SEQ ID NO: 5975 - RNA, 20 nt, synthetic construct
  source 1..20: mol_type = other RNA
caggccggggaggagggaga

SEQ ID NO: 5976 - RNA, 20 nt, synthetic construct
  source 1..20: mol_type = other RNA
gcaggccggggaggagggag

SEQ ID NO: 5977 - RNA, 20 nt, synthetic construct
  source 1..20: mol_type = other RNA
cctccccggcctgcgggttc

SEQ ID NO: 5978 - RNA, 20 nt, synthetic construct
  source 1..20: mol_type = other RNA
aacccgcaggccggggagga

SEQ ID NO: 5979 - RNA, 20 nt, synthetic construct
  source 1..20: mol_type = other RNA
gaacccgcaggccggggagg

SEQ ID NO: 5980 - RNA, 20 nt, synthetic construct
  source 1..20: mol_type = other RNA
ccagaacccgcaggccgggg

SEQ ID NO: 5981 - RNA, 20 nt, synthetic construct
  source 1..20: mol_type = other RNA
aagaagggaaggggtcgccg

SEQ ID NO: 5982 - RNA, 20 nt, synthetic construct
  source 1..20: mol_type = other RNA
caagaagggaaggggtcgcc

SEQ ID NO: 5983 - RNA, 20 nt, synthetic construct
  source 1..20: mol_type = other RNA
gcaagaagggaaggggtcgc

SEQ ID NO: 5984 - RNA, 20 nt, synthetic construct
  source 1..20: mol_type = other RNA
ccccttcccttcttgccttt

SEQ ID NO: 5985 - RNA, 20 nt, synthetic construct
  source 1..20: mol_type = other RNA
ccgaaaggcaagaagggaag

SEQ ID NO: 5986 - RNA, 20 nt, synthetic construct
  source 1..20: mol_type = other RNA
gccgaaaggcaagaagggaa

SEQ ID NO: 5987 - RNA, 20 nt, synthetic construct
  source 1..20: mol_type = other RNA
cgccgaaaggcaagaaggga

SEQ ID NO: 5988 - RNA, 20 nt, synthetic construct
  source 1..20: mol_type = other RNA
acggcgccgaaaggcaagaa

SEQ ID NO: 5989 - RNA, 20 nt, synthetic construct
  source 1..20: mol_type = other RNA
tacggcgccgaaaggcaaga

SEQ ID NO: 5990 - RNA, 20 nt, synthetic construct
  source 1..20: mol_type = other RNA
tggacagctacggcgccgaa

SEQ ID NO: 5991 - RNA, 20 nt, synthetic construct
  source 1..20: mol_type = other RNA
cgcgtgtctctggacagcta

SEQ ID NO: 5992 - RNA, 20 nt, synthetic construct
  source 1..20: mol_type = other RNA
tccagagacacgcgtgtgcg

SEQ ID NO: 5993 - RNA, 20 nt, synthetic construct
  source 1..20: mol_type = other RNA
ccagagacacgcgtgtgcgc

SEQ ID NO: 5994 - RNA, 20 nt, synthetic construct
  source 1..20: mol_type = other RNA
cccgcgcacacgcgtgtctc

SEQ ID NO: 5995 - RNA, 20 nt, synthetic construct
  source 1..20: mol_type = other RNA
gggctgcgtgcgtgtggagt

SEQ ID NO: 5996 - RNA, 20 nt, synthetic construct
  source 1..20: mol_type = other RNA
tgggctgcgtgcgtgtggag

SEQ ID NO: 5997 - RNA, 20 nt, synthetic construct
  source 1..20: mol_type = other RNA
cgcacgcagcccagtgtgtg

SEQ ID NO: 5998 - RNA, 20 nt, synthetic construct
  source 1..20: mol_type = other RNA
gcacgcagcccagtgtgtgt

SEQ ID NO: 5999 - RNA, 20 nt, synthetic construct
  source 1..20: mol_type = other RNA
cacgcagcccagtgtgtgtg

SEQ ID NO: 6000 - RNA, 20 nt, synthetic construct
  source 1..20: mol_type = other RNA
ccagtgtgtgtggggagccc

SEQ ID NO: 6001 - RNA, 20 nt, synthetic construct
  source 1..20: mol_type = other RNA
tgtgtgtggggagccccggc

SEQ ID NO: 6002 - RNA, 20 nt, synthetic construct
  source 1..20: mol_type = other RNA
gtgtgtggggagccccggct

SEQ ID NO: 6003 - RNA, 20 nt, synthetic construct
  source 1..20: mol_type = other RNA
tggggagccccggctgggag

SEQ ID NO: 6004 - RNA, 20 nt, synthetic construct
  source 1..20: mol_type = other RNA
ggggagccccggctgggagt

SEQ ID NO: 6005 - RNA, 20 nt, synthetic construct
  source 1..20: mol_type = other RNA
agcgatcccactcccagccg

SEQ ID NO: 6006 - RNA, 20 nt, synthetic construct
  source 1..20: mol_type = other RNA
cagcgatcccactcccagcc

SEQ ID NO: 6007 - RNA, 20 nt, synthetic construct
  source 1..20: mol_type = other RNA
tcagcgatcccactcccagc

SEQ ID NO: 6008 - RNA, 20 nt, synthetic construct
  source 1..20: mol_type = other RNA
gaacagctcgctcccgaaga

SEQ ID NO: 6009 - RNA, 20 nt, synthetic construct
  source 1..20: mol_type = other RNA
cgctgggttgctccttcttc

SEQ ID NO: 6010 - RNA, 20 nt, synthetic construct
  source 1..20: mol_type = other RNA
gaaggagcaacccagcgcgc

SEQ ID NO: 6011 - RNA, 20 nt, synthetic construct
  source 1..20: mol_type = other RNA
gcgcgcaggcctccgagacg

SEQ ID NO: 6012 - RNA, 20 nt, synthetic construct
  source 1..20: mol_type = other RNA
gtctcggaggcctgcgcgct

SEQ ID NO: 6013 - RNA, 20 nt, synthetic construct
  source 1..20: mol_type = other RNA
cgtctcggaggcctgcgcgc

SEQ ID NO: 6014 - RNA, 20 nt, synthetic construct
  source 1..20: mol_type = other RNA
gttgcgtttccacgtctcgg

SEQ ID NO: 6015 - RNA, 20 nt, synthetic construct
  source 1..20: mol_type = other RNA
attgttgcgtttccacgtct

SEQ ID NO: 6016 - RNA, 20 nt, synthetic construct
  source 1..20: mol_type = other RNA
cgggtgtggatttgtcttga

SEQ ID NO: 6017 - RNA, 20 nt, synthetic construct
  source 1..20: mol_type = other RNA
gcgggaggggagagcgggtg

SEQ ID NO: 6018 - RNA, 20 nt, synthetic construct
  source 1..20: mol_type = other RNA
ctctcccctcccgcccgact

SEQ ID NO: 6019 - RNA, 20 nt, synthetic construct
  source 1..20: mol_type = other RNA
tctcccctcccgcccgactc

SEQ ID NO: 6020 - RNA, 20 nt, synthetic construct
  source 1..20: mol_type = other RNA
ctcccctcccgcccgactcg

SEQ ID NO: 6021 - RNA, 20 nt, synthetic construct
  source 1..20: mol_type = other RNA
ccctcccgcccgactcgggg

SEQ ID NO: 6022 - RNA, 20 nt, synthetic construct
  source 1..20: mol_type = other RNA
ctccccgagtcgggcgggag

SEQ ID NO: 6023 - RNA, 20 nt, synthetic construct
  source 1..20: mol_type = other RNA
cctccccgagtcgggcggga

SEQ ID NO: 6024 - RNA, 20 nt, synthetic construct
  source 1..20: mol_type = other RNA
cgcccgactcggggaggccg

SEQ ID NO: 6025 - RNA, 20 nt, synthetic construct
  source 1..20: mol_type = other RNA
gcccgactcggggaggccgc

SEQ ID NO: 6026 - RNA, 20 nt, synthetic construct
  source 1..20: mol_type = other RNA
gcggcctccccgagtcgggc

SEQ ID NO: 6027 - RNA, 20 nt, synthetic construct
  source 1..20: mol_type = other RNA
cgcggcctccccgagtcggg

SEQ ID NO: 6028 - RNA, 20 nt, synthetic construct
  source 1..20: mol_type = other RNA
tcccgcggcctccccgagtc

SEQ ID NO: 6029 - RNA, 20 nt, synthetic construct
  source 1..20: mol_type = other RNA
gtcccgcggcctccccgagt

SEQ ID NO: 6030 - RNA, 20 nt, synthetic construct
  source 1..20: mol_type = other RNA
agtgctgctgcggcgtcccg

SEQ ID NO: 6031 - RNA, 20 nt, synthetic construct
  source 1..20: mol_type = other RNA
gacgccgcagcagcactagc

SEQ ID NO: 6032 - RNA, 20 nt, synthetic construct
  source 1..20: mol_type = other RNA
gccgcagcagcactagcagg

SEQ ID NO: 6033 - RNA, 20 nt, synthetic construct
  source 1..20: mol_type = other RNA
gcagcagcactagcaggagg

SEQ ID NO: 6034 - RNA, 20 nt, synthetic construct
  source 1..20: mol_type = other RNA
tcctcctgctagtgctgctg

SEQ ID NO: 6035 - RNA, 20 nt, synthetic construct
  source 1..20: mol_type = other RNA
aggaggaggagaccgctcgc

SEQ ID NO: 6036 - RNA, 20 nt, synthetic construct
  source 1..20: mol_type = other RNA
cgctggacaccccacccctg

SEQ ID NO: 6037 - RNA, 20 nt, synthetic construct
  source 1..20: mol_type = other RNA
cccacccctgtggcacacac

SEQ ID NO: 6038 - RNA, 20 nt, synthetic construct
  source 1..20: mol_type = other RNA
cacgaaggagctaaccaata

SEQ ID NO: 6039 - RNA, 20 nt, synthetic construct
  source 1..20: mol_type = other RNA
acgaaggagctaaccaataa

SEQ ID NO: 6040 - RNA, 20 nt, synthetic construct
  source 1..20: mol_type = other RNA
cgaaggagctaaccaataag

SEQ ID NO: 6041 - RNA, 20 nt, synthetic construct
  source 1..20: mol_type = other RNA
aggagctaaccaataagggg

SEQ ID NO: 6042 - RNA, 20 nt, synthetic construct
  source 1..20: mol_type = other RNA
gctaaccaataaggggtggc

SEQ ID NO: 6043 - RNA, 20 nt, synthetic construct
  source 1..20: mol_type = other RNA
aaccaataaggggtggcagg

SEQ ID NO: 6044 - RNA, 20 nt, synthetic construct
  source 1..20: mol_type = other RNA
accaataaggggtggcaggt

SEQ ID NO: 6045 - RNA, 20 nt, synthetic construct
  source 1..20: mol_type = other RNA
gcccacctgccaccccttat

SEQ ID NO: 6046 - RNA, 20 nt, synthetic construct
  source 1..20: mol_type = other RNA
tggcaggtgggcgtgagcgt

SEQ ID NO: 6047 - RNA, 20 nt, synthetic construct
  source 1..20: mol_type = other RNA
ggcaggtgggcgtgagcgtc

SEQ ID NO: 6048 - RNA, 20 nt, synthetic construct
  source 1..20: mol_type = other RNA
gtgggcgtgagcgtcgggac

SEQ ID NO: 6049 - RNA, 20 nt, synthetic construct
  source 1..20: mol_type = other RNA
tgggcgtgagcgtcgggacc

SEQ ID NO: 6050 - RNA, 20 nt, synthetic construct
  source 1..20: mol_type = other RNA
gaccgggagccaaagccatc

SEQ ID NO: 6051 - RNA, 20 nt, synthetic construct
  source 1..20: mol_type = other RNA
accgggagccaaagccatct

SEQ ID NO: 6052 - RNA, 20 nt, synthetic construct
  source 1..20: mol_type = other RNA
ccgggagccaaagccatctg

SEQ ID NO: 6053 - RNA, 20 nt, synthetic construct
  source 1..20: mol_type = other RNA
ccccagatggctttggctcc

SEQ ID NO: 6054 - RNA, 20 nt, synthetic construct
  source 1..20: mol_type = other RNA
caaagccatctggggctgaa

SEQ ID NO: 6055 - RNA, 20 nt, synthetic construct
  source 1..20: mol_type = other RNA
agccatctggggctgaaagg

SEQ ID NO: 6056 - RNA, 20 nt, synthetic construct
  source 1..20: mol_type = other RNA
gccatctggggctgaaaggc

SEQ ID NO: 6057 - RNA, 20 nt, synthetic construct
  source 1..20: mol_type = other RNA
tcccgcctttcagccccaga

SEQ ID NO: 6058 - RNA, 20 nt, synthetic construct
  source 1..20: mol_type = other RNA
actaggaaggtaagcgaagc

SEQ ID NO: 6059 - RNA, 20 nt, synthetic construct
  source 1..20: mol_type = other RNA
tatgaaacaaaagactagga

SEQ ID NO: 6060 - RNA, 20 nt, synthetic construct
  source 1..20: mol_type = other RNA
ttgctatgaaacaaaagact

SEQ ID NO: 6061 - RNA, 20 nt, synthetic construct
  source 1..20: mol_type = other RNA
gtttcatagcaacagagtag

SEQ ID NO: 6062 - RNA, 20 nt, synthetic construct
  source 1..20: mol_type = other RNA
catagcaacagagtagtggc

SEQ ID NO: 6063 - RNA, 20 nt, synthetic construct
  source 1..20: mol_type = other RNA
gcaacagagtagtggctgga

SEQ ID NO: 6064 - RNA, 20 nt, synthetic construct
  source 1..20: mol_type = other RNA
caacagagtagtggctggaa

SEQ ID NO: 6065 - RNA, 20 nt, synthetic construct
  source 1..20: mol_type = other RNA
agggtgttgcttctccgctc

SEQ ID NO: 6066 - RNA, 20 nt, synthetic construct
  source 1..20: mol_type = other RNA
gggtgttgcttctccgctct

SEQ ID NO: 6067 - RNA, 20 nt, synthetic construct
  source 1..20: mol_type = other RNA
tgttgcttctccgctctggg

SEQ ID NO: 6068 - RNA, 20 nt, synthetic construct
  source 1..20: mol_type = other RNA
gttgcttctccgctctgggc

SEQ ID NO: 6069 - RNA, 20 nt, synthetic construct
  source 1..20: mol_type = other RNA
gctctgggcgggtccaacgc

SEQ ID NO: 6070 - RNA, 20 nt, synthetic construct
  source 1..20: mol_type = other RNA
agcgttggacccgcccagag

SEQ ID NO: 6071 - RNA, 20 nt, synthetic construct
  source 1..20: mol_type = other RNA
gagatgaatttctccagcgt

SEQ ID NO: 6072 - RNA, 20 nt, synthetic construct
  source 1..20: mol_type = other RNA
ctggagaaattcatctccct

SEQ ID NO: 6073 - RNA, 20 nt, synthetic construct
  source 1..20: mol_type = other RNA
tggagaaattcatctcccta

SEQ ID NO: 6074 - RNA, 20 nt, synthetic construct
  source 1..20: mol_type = other RNA
agaagggtttggcagcccta

SEQ ID NO: 6075 - RNA, 20 nt, synthetic construct
  source 1..20: mol_type = other RNA
tagaagggtttggcagccct

SEQ ID NO: 6076 - RNA, 20 nt, synthetic construct
  source 1..20: mol_type = other RNA
gctgccaaacccttctaccc

SEQ ID NO: 6077 - RNA, 20 nt, synthetic construct
  source 1..20: mol_type = other RNA
ctgtcctgggtagaagggtt

SEQ ID NO: 6078 - RNA, 20 nt, synthetic construct
  source 1..20: mol_type = other RNA
ggctgctgtcctgggtagaa

SEQ ID NO: 6079 - RNA, 20 nt, synthetic construct
  source 1..20: mol_type = other RNA
tggctgctgtcctgggtaga

SEQ ID NO: 6080 - RNA, 20 nt, synthetic construct
  source 1..20: mol_type = other RNA
acccaggacagcagccaaac

SEQ ID NO: 6081 - RNA, 20 nt, synthetic construct
  source 1..20: mol_type = other RNA
acctgtttggctgctgtcct

SEQ ID NO: 6082 - RNA, 20 nt, synthetic construct
  source 1..20: mol_type = other RNA
gacctgtttggctgctgtcc

SEQ ID NO: 6083 - RNA, 20 nt, synthetic construct
  source 1..20: mol_type = other RNA
agcaacgtcatagacctgtt

SEQ ID NO: 6084 - RNA, 20 nt, synthetic construct
  source 1..20: mol_type = other RNA
tctatgacgttgcttcttgt

SEQ ID NO: 6085 - RNA, 20 nt, synthetic construct
  source 1..20: mol_type = other RNA
tctgcattttagaagctcag

SEQ ID NO: 6086 - RNA, 20 nt, synthetic construct
  source 1..20: mol_type = other RNA
gaataaatctcacagagagt

SEQ ID NO: 6087 - RNA, 20 nt, synthetic construct
  source 1..20: mol_type = other RNA
aaatctcacagagagtaggc

SEQ ID NO: 6088 - RNA, 20 nt, synthetic construct
  source 1..20: mol_type = other RNA
aatctcacagagagtaggct

SEQ ID NO: 6089 - RNA, 20 nt, synthetic construct
  source 1..20: mol_type = other RNA
atctcacagagagtaggctg

SEQ ID NO: 6090 - RNA, 20 nt, synthetic construct
  source 1..20: mol_type = other RNA
gaaacttgggaagtttcagt

SEQ ID NO: 6091 - RNA, 20 nt, synthetic construct
  source 1..20: mol_type = other RNA
aaagagaaactcggaaactt

SEQ ID NO: 6092 - RNA, 20 nt, synthetic construct
  source 1..20: mol_type = other RNA
aaaagagaaactcggaaact

SEQ ID NO: 6093 - RNA, 20 nt, synthetic construct
  source 1..20: mol_type = other RNA
ctaacagcaaaagagaaact

SEQ ID NO: 6094 - RNA, 20 nt, synthetic construct
  source 1..20: mol_type = other RNA
tcttttgctgttagttttag

SEQ ID NO: 6095 - RNA, 20 nt, synthetic construct
  source 1..20: mol_type = other RNA
cttttgctgttagttttaga

SEQ ID NO: 6096 - RNA, 20 nt, synthetic construct
  source 1..20: mol_type = other RNA
gggattgcagaccaaacatc

SEQ ID NO: 6097 - RNA, 20 nt, synthetic construct
  source 1..20: mol_type = other RNA
tttttcatcagcctgatgtt

SEQ ID NO: 6098 - RNA, 20 nt, synthetic construct
  source 1..20: mol_type = other RNA
aagcaaatagttgacaacgc

SEQ ID NO: 6099 - RNA, 20 nt, synthetic construct
  source 1..20: mol_type = other RNA
catgattagcagagactgtt

SEQ ID NO: 6100 - RNA, 20 nt, synthetic construct
  source 1..20: mol_type = other RNA
gcaataaaagtaccagataa

SEQ ID NO: 6101 - RNA, 20 nt, synthetic construct
  source 1..20: mol_type = other RNA
caataaaagtaccagataat

SEQ ID NO: 6102 - RNA, 20 nt, synthetic construct
  source 1..20: mol_type = other RNA
tatcagcaattcccattatc

SEQ ID NO: 6103 - RNA, 20 nt, synthetic construct
  source 1..20: mol_type = other RNA
gcactaagtaaaaaggtgca

SEQ ID NO: 6104 - RNA, 20 nt, synthetic construct
  source 1..20: mol_type = other RNA
gaaacttgcactaagtaaaa

SEQ ID NO: 6105 - RNA, 20 nt, synthetic construct
  source 1..20: mol_type = other RNA
agtttctgcctaaatgactg

SEQ ID NO: 6106 - RNA, 20 nt, synthetic construct
  source 1..20: mol_type = other RNA
ttctgcctaaatgactgagg

SEQ ID NO: 6107 - RNA, 20 nt, synthetic construct
  source 1..20: mol_type = other RNA
tgtctcctcctcagtcattt

SEQ ID NO: 6108 - RNA, 20 nt, synthetic construct
  source 1..20: mol_type = other RNA
agacagctactgtgttttgt

SEQ ID NO: 6109 - RNA, 20 nt, synthetic construct
  source 1..20: mol_type = other RNA
atggatagaaatctatgtaa

SEQ ID NO: 6110 - RNA, 20 nt, synthetic construct
  source 1..20: mol_type = other RNA
acagtaaggttgtttttaaa

SEQ ID NO: 6111 - RNA, 20 nt, synthetic construct
  source 1..20: mol_type = other RNA
agagaatggcagctacagta

SEQ ID NO: 6112 - RNA, 20 nt, synthetic construct
  source 1..20: mol_type = other RNA
gtaacaatgctggtagagaa

SEQ ID NO: 6113 - RNA, 20 nt, synthetic construct
  source 1..20: mol_type = other RNA
agcattgttacctctttctg

SEQ ID NO: 6114 - RNA, 20 nt, synthetic construct
  source 1..20: mol_type = other RNA
acagaaagaggtaacaatgc

SEQ ID NO: 6115 - RNA, 20 nt, synthetic construct
  source 1..20: mol_type = other RNA
aagaagggagccacagaaag

SEQ ID NO: 6116 - RNA, 20 nt, synthetic construct
  source 1..20: mol_type = other RNA
ccttctttgtgctcttaaaa

SEQ ID NO: 6117 - RNA, 20 nt, synthetic construct
  source 1..20: mol_type = other RNA
ctttttaagagcacaaagaa

SEQ ID NO: 6118 - RNA, 20 nt, synthetic construct
  source 1..20: mol_type = other RNA
cctttttaagagcacaaaga

SEQ ID NO: 6119 - RNA, 20 nt, synthetic construct
  source 1..20: mol_type = other RNA
ctcttaaaaaggccgacatc

SEQ ID NO: 6120 - RNA, 20 nt, synthetic construct
  source 1..20: mol_type = other RNA
gacatctggctagtctttaa

SEQ ID NO: 6121 - RNA, 20 nt, synthetic construct
  source 1..20: mol_type = other RNA
tttaaagactagccagatgt

SEQ ID NO: 6122 - RNA, 20 nt, synthetic construct
  source 1..20: mol_type = other RNA
aaaggagaaagctactgtgc

SEQ ID NO: 6123 - RNA, 20 nt, synthetic construct
  source 1..20: mol_type = other RNA
aaggagaaagctactgtgct

SEQ ID NO: 6124 - RNA, 20 nt, synthetic construct
  source 1..20: mol_type = other RNA
ttgtctttcagcaatatcat

SEQ ID NO: 6125 - RNA, 20 nt, synthetic construct
  source 1..20: mol_type = other RNA
agtaaactgaaataaatgga

SEQ ID NO: 6126 - RNA, 20 nt, synthetic construct
  source 1..20: mol_type = other RNA
ttgaagtaaactgaaataaa

SEQ ID NO: 6127 - RNA, 20 nt, synthetic construct
  source 1..20: mol_type = other RNA
ttgttggtagcatgagtggt

SEQ ID NO: 6128 - RNA, 20 nt, synthetic construct
  source 1..20: mol_type = other RNA
attgttggtagcatgagtgg

SEQ ID NO: 6129 - RNA, 20 nt, synthetic construct
  source 1..20: mol_type = other RNA
catgctaccaacaattgctc

SEQ ID NO: 6130 - RNA, 20 nt, synthetic construct
  source 1..20: mol_type = other RNA
atgaagtccagagcaattgt

SEQ ID NO: 6131 - RNA, 20 nt, synthetic construct
  source 1..20: mol_type = other RNA
ttgctctggacttcatactt

SEQ ID NO: 6132 - RNA, 20 nt, synthetic construct
  source 1..20: mol_type = other RNA
ataaacgctatcaactgtag

SEQ ID NO: 6133 - RNA, 20 nt, synthetic construct
  source 1..20: mol_type = other RNA
gtttattacacttttcagct

SEQ ID NO: 6134 - RNA, 20 nt, synthetic construct
  source 1..20: mol_type = other RNA
gatgttctgatattttacat

SEQ ID NO: 6135 - RNA, 20 nt, synthetic construct
  source 1..20: mol_type = other RNA
atgttctgatattttacatt

SEQ ID NO: 6136 - RNA, 20 nt, synthetic construct
  source 1..20: mol_type = other RNA
aaacattttatcaggttacg

SEQ ID NO: 6137 - RNA, 20 nt, synthetic construct
  source 1..20: mol_type = other RNA
cctgataaaatgtttctcaa

SEQ ID NO: 6138 - RNA, 20 nt, synthetic construct
  source 1..20: mol_type = other RNA
ccattgagaaacattttatc

SEQ ID NO: 6139 - RNA, 20 nt, synthetic construct
  source 1..20: mol_type = other RNA
aattcttagttgctagaaag

SEQ ID NO: 6140 - RNA, 20 nt, synthetic construct
  source 1..20: mol_type = other RNA
tactgtaattattactatga

SEQ ID NO: 6141 - RNA, 20 nt, synthetic construct
  source 1..20: mol_type = other RNA
aaggctgtaaaggaaaactc

SEQ ID NO: 6142 - RNA, 20 nt, synthetic construct
  source 1..20: mol_type = other RNA
tttacagccttgaatttaca

SEQ ID NO: 6143 - RNA, 20 nt, synthetic construct
  source 1..20: mol_type = other RNA
atgtaaattcaaggctgtaa

SEQ ID NO: 6144 - RNA, 20 nt, synthetic construct
  source 1..20: mol_type = other RNA
atcttaaccatgtaaattca

SEQ ID NO: 6145 - RNA, 20 nt, synthetic construct
  source 1..20: mol_type = other RNA
atgtgcctttgcaaccagtc

SEQ ID NO: 6146 - RNA, 20 nt, synthetic construct
  source 1..20: mol_type = other RNA
tatcacctgactggttgcaa

SEQ ID NO: 6147 - RNA, 20 nt, synthetic construct
  source 1..20: mol_type = other RNA
caggtgataaagtgtgattc

SEQ ID NO: 6148 - RNA, 20 nt, synthetic construct
  source 1..20: mol_type = other RNA
ctggcacagaaataatgaca

SEQ ID NO: 6149 - RNA, 20 nt, synthetic construct
  source 1..20: mol_type = other RNA
aggaactactctttaattac

SEQ ID NO: 6150 - RNA, 20 nt, synthetic construct
  source 1..20: mol_type = other RNA
ataaatgcaatgtgaaaaca

SEQ ID NO: 6151 - RNA, 20 nt, synthetic construct
  source 1..20: mol_type = other RNA
gcatttatctacaaaagtgc

SEQ ID NO: 6152 - RNA, 20 nt, synthetic construct
  source 1..20: mol_type = other RNA
tgggtggaggagatatggag

SEQ ID NO: 6153 - RNA, 20 nt, synthetic construct
  source 1..20: mol_type = other RNA
atggatgggtggaggagata

SEQ ID NO: 6154 - RNA, 20 nt, synthetic construct
  source 1..20: mol_type = other RNA
aaagagatatggatgggtgg

SEQ ID NO: 6155 - RNA, 20 nt, synthetic construct
  source 1..20: mol_type = other RNA
gtaaaagagatatggatggg

SEQ ID NO: 6156 - RNA, 20 nt, synthetic construct
  source 1..20: mol_type = other RNA
tgagtaaaagagatatggat

SEQ ID NO: 6157 - RNA, 20 nt, synthetic construct
  source 1..20: mol_type = other RNA
atgagtaaaagagatatgga

SEQ ID NO: 6158 - RNA, 20 nt, synthetic construct
  source 1..20: mol_type = other RNA
gactatgagtaaaagagata

SEQ ID NO: 6159 - RNA, 20 nt, synthetic construct
  source 1..20: mol_type = other RNA
cgtagtagctacatttacta

SEQ ID NO: 6160 - RNA, 20 nt, synthetic construct
  source 1..20: mol_type = other RNA
gtagtagctacatttactaa

SEQ ID NO: 6161 - RNA, 20 nt, synthetic construct
  source 1..20: mol_type = other RNA
tagtagctacatttactaag

SEQ ID NO: 6162 - RNA, 20 nt, synthetic construct
  source 1..20: mol_type = other RNA
tcttttaaaatttattttaa

SEQ ID NO: 6163 - RNA, 20 nt, synthetic construct
  source 1..20: mol_type = other RNA
agaagcatgtagcaaaacag

SEQ ID NO: 6164 - RNA, 20 nt, synthetic construct
  source 1..20: mol_type = other RNA
tgtagcaaaacagtggctta

SEQ ID NO: 6165 - RNA, 20 nt, synthetic construct
  source 1..20: mol_type = other RNA
gtagcaaaacagtggcttaa

SEQ ID NO: 6166 - RNA, 20 nt, synthetic construct
  source 1..20: mol_type = other RNA
atattacttatattcatatc

SEQ ID NO: 6167 - RNA, 20 nt, synthetic construct
  source 1..20: mol_type = other RNA
catgctataacatgtatttt

SEQ ID NO: 6168 - RNA, 20 nt, synthetic construct
  source 1..20: mol_type = other RNA
acatgctataacatgtattt

SEQ ID NO: 6169 - RNA, 20 nt, synthetic construct
  source 1..20: mol_type = other RNA
catgtgccattccttttata

SEQ ID NO: 6170 - RNA, 20 nt, synthetic construct
  source 1..20: mol_type = other RNA
aaaacaccatataaaaggaa

SEQ ID NO: 6171 - RNA, 20 nt, synthetic construct
  source 1..20: mol_type = other RNA
gttgcaaaacaccatataaa

SEQ ID NO: 6172 - RNA, 20 nt, synthetic construct
  source 1..20: mol_type = other RNA
gagatgagttaatgagaaaa

SEQ ID NO: 6173 - RNA, 20 nt, synthetic construct
  source 1..20: mol_type = other RNA
tgagaaaatggcattgccta

SEQ ID NO: 6174 - RNA, 20 nt, synthetic construct
  source 1..20: mol_type = other RNA
catgatatgcttgataccat

SEQ ID NO: 6175 - RNA, 20 nt, synthetic construct
  source 1..20: mol_type = other RNA
gatataaattacaagttttg

SEQ ID NO: 6176 - RNA, 20 nt, synthetic construct
  source 1..20: mol_type = other RNA
attacaagttttgaggtgta

SEQ ID NO: 6177 - DNA, 28 bp, synthetic construct
  source 1..28: mol_type = other DNA
tttaaaagaacagataaagtacttgagg

SEQ ID NO: 6178 - DNA, 28 bp, synthetic construct
  source 1..28: mol_type = other DNA
ggttacataataaccagaattgaaaagg

SEQ ID NO: 6179 - DNA, 28 bp, synthetic construct
  source 1..28: mol_type = other DNA
tattttattcattccttttcaattctgg

SEQ ID NO: 6180 - DNA, 28 bp, synthetic construct
  source 1..28: mol_type = other DNA
ttgccacatcacacaagttttaaaaagg

SEQ ID NO: 6181 - DNA, 28 bp, synthetic construct
  source 1..28: mol_type = other DNA
atgcctttttaaaacttgtgtgatgtgg

SEQ ID NO: 6182 - DNA, 28 bp, synthetic construct
  source 1..28: mol_type = other DNA
ttttaaaaaacaataaaatagtaattgg

SEQ ID NO: 6183 - DNA, 28 bp, synthetic construct
  source 1..28: mol_type = other DNA
tttaaaaaacaataaaatagtaattggg

SEQ ID NO: 6184 - DNA, 28 bp, synthetic construct
  source 1..28: mol_type = other DNA
ttaaaaaacaataaaatagtaattgggg

SEQ ID NO: 6185 - DNA, 28 bp, synthetic construct
  source 1..28: mol_type = other DNA
ttggggaaaaaacccttcactctattgg

SEQ ID NO: 6186 - DNA, 28 bp, synthetic construct
  source 1..28: mol_type = other DNA
cagacaaagacaccaatagagtgaaggg

SEQ ID NO: 6187 - DNA, 28 bp, synthetic construct
  source 1..28: mol_type = other DNA
ccttcactctattggtgtctttgtctgg

SEQ ID NO: 6188 - DNA, 28 bp, synthetic construct
  source 1..28: mol_type = other DNA
actttcccagaatcactaaaattccagg

SEQ ID NO: 6189 - DNA, 28 bp, synthetic construct
  source 1..28: mol_type = other DNA
gttgacctggaattttagtgattctggg

SEQ ID NO: 6190 - DNA, 28 bp, synthetic construct
  source 1..28: mol_type = other DNA
tgttgacctggaattttagtgattctgg

SEQ ID NO: 6191 - DNA, 28 bp, synthetic construct
  source 1..28: mol_type = other DNA
agaatcactaaaattccaggtcaacagg

SEQ ID NO: 6192 - DNA, 28 bp, synthetic construct
  source 1..28: mol_type = other DNA
ataattcaggtactacctgttgacctgg

SEQ ID NO: 6193 - DNA, 28 bp, synthetic construct
  source 1..28: mol_type = other DNA
aaattacagtatacttgaataattcagg

SEQ ID NO: 6194 - DNA, 28 bp, synthetic construct
  source 1..28: mol_type = other DNA
agtttctctcttcagctaacagatttgg

SEQ ID NO: 6195 - DNA, 28 bp, synthetic construct
  source 1..28: mol_type = other DNA
agctttgatttgcactgaattaacttgg

SEQ ID NO: 6196 - DNA, 28 bp, synthetic construct
  source 1..28: mol_type = other DNA
agagaaaaaataacgttcgaactgtagg

SEQ ID NO: 6197 - DNA, 28 bp, synthetic construct
  source 1..28: mol_type = other DNA
acgttcgaactgtaggaaatgcttctgg

SEQ ID NO: 6198 - DNA, 28 bp, synthetic construct
  source 1..28: mol_type = other DNA
atgaagaaatctttgcaagtgttcttgg

SEQ ID NO: 6199 - DNA, 28 bp, synthetic construct
  source 1..28: mol_type = other DNA
gtatatgaaatgctgagttaagaaatgg

SEQ ID NO: 6200 - DNA, 28 bp, synthetic construct
  source 1..28: mol_type = other DNA
tatatgaaatgctgagttaagaaatggg

SEQ ID NO: 6201 - DNA, 28 bp, synthetic construct
  source 1..28: mol_type = other DNA
aatgggacccttttaagttgcagtgagg

SEQ ID NO: 6202 - DNA, 28 bp, synthetic construct
  source 1..28: mol_type = other DNA
atgggacccttttaagttgcagtgaggg

SEQ ID NO: 6203 - DNA, 28 bp, synthetic construct
  source 1..28: mol_type = other DNA
atagaaccctcactgcaacttaaaaggg

SEQ ID NO: 6204 - DNA, 28 bp, synthetic construct
  source 1..28: mol_type = other DNA
aatagaaccctcactgcaacttaaaagg

SEQ ID NO: 6205 - DNA, 28 bp, synthetic construct
  source 1..28: mol_type = other DNA
tctattatgaagactatttgcaatgtgg

SEQ ID NO: 6206 - DNA, 28 bp, synthetic construct
  source 1..28: mol_type = other DNA
ctattatgaagactatttgcaatgtggg

SEQ ID NO: 6207 - DNA, 28 bp, synthetic construct
  source 1..28: mol_type = other DNA
gaagactatttgcaatgtgggcaaaagg

SEQ ID NO: 6208 - DNA, 28 bp, synthetic construct
  source 1..28: mol_type = other DNA
aagactatttgcaatgtgggcaaaaggg

SEQ ID NO: 6209 - DNA, 28 bp, synthetic construct
  source 1..28: mol_type = other DNA
caatgtgggcaaaagggaaacagagagg

SEQ ID NO: 6210 - DNA, 28 bp, synthetic construct
  source 1..28: mol_type = other DNA
aatgtgggcaaaagggaaacagagaggg

SEQ ID NO: 6211 - DNA, 28 bp, synthetic construct
  source 1..28: mol_type = other DNA
agggaaacagagagggaagagctgaagg

SEQ ID NO: 6212 - DNA, 28 bp, synthetic construct
  source 1..28: mol_type = other DNA
agggaagagctgaaggttgtatttgtgg

SEQ ID NO: 6213 - DNA, 28 bp, synthetic construct
  source 1..28: mol_type = other DNA
aagagctgaaggttgtatttgtggaagg

SEQ ID NO: 6214 - DNA, 28 bp, synthetic construct
  source 1..28: mol_type = other DNA
gcttttattcaattctagaaaaatttgg

SEQ ID NO: 6215 - DNA, 28 bp, synthetic construct
  source 1..28: mol_type = other DNA
aatttggtgagatatatcatacattagg

SEQ ID NO: 6216 - DNA, 28 bp, synthetic construct
  source 1..28: mol_type = other DNA
atttggtgagatatatcatacattaggg

SEQ ID NO: 6217 - DNA, 28 bp, synthetic construct
  source 1..28: mol_type = other DNA
tttggtgagatatatcatacattagggg

SEQ ID NO: 6218 - DNA, 28 bp, synthetic construct
  source 1..28: mol_type = other DNA
atacattaggggataaaacagattatgg

SEQ ID NO: 6219 - DNA, 28 bp, synthetic construct
  source 1..28: mol_type = other DNA
aaacagattatggagataaatttactgg

SEQ ID NO: 6220 - DNA, 28 bp, synthetic construct
  source 1..28: mol_type = other DNA
agataaatttactggaatataattgagg

SEQ ID NO: 6221 - DNA, 28 bp, synthetic construct
  source 1..28: mol_type = other DNA
agtccttctatctccagaacatgtttgg

SEQ ID NO: 6222 - DNA, 28 bp, synthetic construct
  source 1..28: mol_type = other DNA
gtccttctatctccagaacatgtttggg

SEQ ID NO: 6223 - DNA, 28 bp, synthetic construct
  source 1..28: mol_type = other DNA
aacccaaacatgttctggagatagaagg

SEQ ID NO: 6224 - DNA, 28 bp, synthetic construct
  source 1..28: mol_type = other DNA
ttctatctccagaacatgtttgggttgg

SEQ ID NO: 6225 - DNA, 28 bp, synthetic construct
  source 1..28: mol_type = other DNA
tctatctccagaacatgtttgggttggg

SEQ ID NO: 6226 - DNA, 28 bp, synthetic construct
  source 1..28: mol_type = other DNA
cttctcacccaacccaaacatgttctgg

SEQ ID NO: 6227 - DNA, 28 bp, synthetic construct
  source 1..28: mol_type = other DNA
cagaacatgtttgggttgggtgagaagg

SEQ ID NO: 6228 - DNA, 28 bp, synthetic construct
  source 1..28: mol_type = other DNA
agaacatgtttgggttgggtgagaaggg

SEQ ID NO: 6229 - DNA, 28 bp, synthetic construct
  source 1..28: mol_type = other DNA
tgggttgggtgagaagggttgatattgg

SEQ ID NO: 6230 - DNA, 28 bp, synthetic construct
  source 1..28: mol_type = other DNA
taagacaaattaacttactgatatgtgg

SEQ ID NO: 6231 - DNA, 28 bp, synthetic construct
  source 1..28: mol_type = other DNA
aaaattgttaccaaatcttgagaaatgg

SEQ ID NO: 6232 - DNA, 28 bp, synthetic construct
  source 1..28: mol_type = other DNA
ttgttaccaaatcttgagaaatggaagg

SEQ ID NO: 6233 - DNA, 28 bp, synthetic construct
  source 1..28: mol_type = other DNA
gacattccttccatttctcaagatttgg

SEQ ID NO: 6234 - DNA, 28 bp, synthetic construct
  source 1..28: mol_type = other DNA
gaaatggaaggaatgtctaactttttgg

SEQ ID NO: 6235 - DNA, 28 bp, synthetic construct
  source 1..28: mol_type = other DNA
ttttggatcacagtgaaacaaagtctgg

SEQ ID NO: 6236 - DNA, 28 bp, synthetic construct
  source 1..28: mol_type = other DNA
gtaaaagcgactgctcgttgatgtctgg

SEQ ID NO: 6237 - DNA, 28 bp, synthetic construct
  source 1..28: mol_type = other DNA
ttttacaataaaaaaaaatttttttagg

SEQ ID NO: 6238 - DNA, 28 bp, synthetic construct
  source 1..28: mol_type = other DNA
aaaatttttttaggtttaatttcatagg

SEQ ID NO: 6239 - DNA, 28 bp, synthetic construct
  source 1..28: mol_type = other DNA
taatttcataggtgatagatagcaatgg

SEQ ID NO: 6240 - DNA, 28 bp, synthetic construct
  source 1..28: mol_type = other DNA
aatttcataggtgatagatagcaatggg

SEQ ID NO: 6241 - DNA, 28 bp, synthetic construct
  source 1..28: mol_type = other DNA
aattcatacgtaatggaatgaaaagagg

SEQ ID NO: 6242 - DNA, 28 bp, synthetic construct
  source 1..28: mol_type = other DNA
gaatgaatcaaaaattcatacgtaatgg

SEQ ID NO: 6243 - DNA, 28 bp, synthetic construct
  source 1..28: mol_type = other DNA
cattctttttaaatgacaatactaatgg

SEQ ID NO: 6244 - DNA, 28 bp, synthetic construct
  source 1..28: mol_type = other DNA
tgagtacaagatgcagagattttgctgg

SEQ ID NO: 6245 - DNA, 28 bp, synthetic construct
  source 1..28: mol_type = other DNA
gtacaagatgcagagattttgctggagg

SEQ ID NO: 6246 - DNA, 28 bp, synthetic construct
  source 1..28: mol_type = other DNA
aagatgcagagattttgctggaggctgg

SEQ ID NO: 6247 - DNA, 28 bp, synthetic construct
  source 1..28: mol_type = other DNA
ctgaaatttgggggtggggggtgggggg

SEQ ID NO: 6248 - DNA, 28 bp, synthetic construct
  source 1..28: mol_type = other DNA
cccccaccccccacccccaaatttcagg

SEQ ID NO: 6249 - DNA, 28 bp, synthetic construct
  source 1..28: mol_type = other DNA
acctgaaatttgggggtggggggtgggg

SEQ ID NO: 6250 - DNA, 28 bp, synthetic construct
  source 1..28: mol_type = other DNA
gacctgaaatttgggggtggggggtggg

SEQ ID NO: 6251 - DNA, 28 bp, synthetic construct
  source 1..28: mol_type = other DNA
ggacctgaaatttgggggtggggggtgg

SEQ ID NO: 6252 - DNA, 28 bp, synthetic construct
  source 1..28: mol_type = other DNA
ccccccacccccaaatttcaggtccagg

SEQ ID NO: 6253 - DNA, 28 bp, synthetic construct
  source 1..28: mol_type = other DNA
acctggacctgaaatttgggggtggggg

SEQ ID NO: 6254 - DNA, 28 bp, synthetic construct
  source 1..28: mol_type = other DNA
aacctggacctgaaatttgggggtgggg

SEQ ID NO: 6255 - DNA, 28 bp, synthetic construct
  source 1..28: mol_type = other DNA
aaacctggacctgaaatttgggggtggg

SEQ ID NO: 6256 - DNA, 28 bp, synthetic construct
  source 1..28: mol_type = other DNA
caaacctggacctgaaatttgggggtgg

SEQ ID NO: 6257 - DNA, 28 bp, synthetic construct
  source 1..28: mol_type = other DNA
tagcaaacctggacctgaaatttggggg

SEQ ID NO: 6258 - DNA, 28 bp, synthetic construct
  source 1..28: mol_type = other DNA
atagcaaacctggacctgaaatttgggg

SEQ ID NO: 6259 - DNA, 28 bp, synthetic construct
  source 1..28: mol_type = other DNA
tatagcaaacctggacctgaaatttggg

SEQ ID NO: 6260 - DNA, 28 bp, synthetic construct
  source 1..28: mol_type = other DNA
atatagcaaacctggacctgaaatttgg

SEQ ID NO: 6261 - DNA, 28 bp, synthetic construct
  source 1..28: mol_type = other DNA
aggactagtgatgatatagcaaacctgg

SEQ ID NO: 6262 - DNA, 28 bp, synthetic construct
  source 1..28: mol_type = other DNA
tcactagtccttttttaattctcactgg

SEQ ID NO: 6263 - DNA, 28 bp, synthetic construct
  source 1..28: mol_type = other DNA
gaaaatttccagtgagaattaaaaaagg

SEQ ID NO: 6264 - DNA, 28 bp, synthetic construct
  source 1..28: mol_type = other DNA
attttacatcattctctaatatattagg

SEQ ID NO: 6265 - DNA, 28 bp, synthetic construct
  source 1..28: mol_type = other DNA
ttgcaacaatgttatcacaatgaagtgg

SEQ ID NO: 6266 - DNA, 28 bp, synthetic construct
  source 1..28: mol_type = other DNA
gttatcacaatgaagtggcaacttttgg

SEQ ID NO: 6267 - DNA, 28 bp, synthetic construct
  source 1..28: mol_type = other DNA
attgctgatgataggtacagtctaaagg

SEQ ID NO: 6268 - DNA, 28 bp, synthetic construct
  source 1..28: mol_type = other DNA
gtacctatcatcagcaatcataaaaagg

SEQ ID NO: 6269 - DNA, 28 bp, synthetic construct
  source 1..28: mol_type = other DNA
tggcctttttatgattgctgatgatagg

SEQ ID NO: 6270 - DNA, 28 bp, synthetic construct
  source 1..28: mol_type = other DNA
ggccaaaataaacagtgctattccaagg

SEQ ID NO: 6271 - DNA, 28 bp, synthetic construct
  source 1..28: mol_type = other DNA
caccttggaatagcactgtttattttgg

SEQ ID NO: 6272 - DNA, 28 bp, synthetic construct
  source 1..28: mol_type = other DNA
gttttaacagtttcagatgtcaccttgg

SEQ ID NO: 6273 - DNA, 28 bp, synthetic construct
  source 1..28: mol_type = other DNA
aagtgaaaaatcataatgacaaaacagg

SEQ ID NO: 6274 - DNA, 28 bp, synthetic construct
  source 1..28: mol_type = other DNA
agtgaaaaatcataatgacaaaacaggg

SEQ ID NO: 6275 - DNA, 28 bp, synthetic construct
  source 1..28: mol_type = other DNA
gtgaaaaatcataatgacaaaacagggg

SEQ ID NO: 6276 - DNA, 28 bp, synthetic construct
  source 1..28: mol_type = other DNA
gtttcttacacttttaaaattgcattgg

SEQ ID NO: 6277 - DNA, 28 bp, synthetic construct
  source 1..28: mol_type = other DNA
gaaacttcactcatgtacctactcatgg

SEQ ID NO: 6278 - DNA, 28 bp, synthetic construct
  source 1..28: mol_type = other DNA
aaacttcactcatgtacctactcatggg

SEQ ID NO: 6279 - DNA, 28 bp, synthetic construct
  source 1..28: mol_type = other DNA
tacctactcatgggaagaacatctaagg

SEQ ID NO: 6280 - DNA, 28 bp, synthetic construct
  source 1..28: mol_type = other DNA
tgccttagatgttcttcccatgagtagg

SEQ ID NO: 6281 - DNA, 28 bp, synthetic construct
  source 1..28: mol_type = other DNA
taaggcaaatgaaaaattcccctccagg

SEQ ID NO: 6282 - DNA, 28 bp, synthetic construct
  source 1..28: mol_type = other DNA
aaggcaaatgaaaaattcccctccaggg

SEQ ID NO: 6283 - DNA, 28 bp, synthetic construct
  source 1..28: mol_type = other DNA
ttctgagctggttatgtccctggagggg

SEQ ID NO: 6284 - DNA, 28 bp, synthetic construct
  source 1..28: mol_type = other DNA
gttctgagctggttatgtccctggaggg

SEQ ID NO: 6285 - DNA, 28 bp, synthetic construct
  source 1..28: mol_type = other DNA
ggttctgagctggttatgtccctggagg

SEQ ID NO: 6286 - DNA, 28 bp, synthetic construct
  source 1..28: mol_type = other DNA
gatggttctgagctggttatgtccctgg

SEQ ID NO: 6287 - DNA, 28 bp, synthetic construct
  source 1..28: mol_type = other DNA
tgaattttttcagatggttctgagctgg

SEQ ID NO: 6288 - DNA, 28 bp, synthetic construct
  source 1..28: mol_type = other DNA
ctgcttttgtatgaattttttcagatgg

SEQ ID NO: 6289 - DNA, 28 bp, synthetic construct
  source 1..28: mol_type = other DNA
ttcatacaaaagcagaaattacccaagg

SEQ ID NO: 6290 - DNA, 28 bp, synthetic construct
  source 1..28: mol_type = other DNA
tatgagatgaggactcacaggccttggg

SEQ ID NO: 6291 - DNA, 28 bp, synthetic construct
  source 1..28: mol_type = other DNA
gtatgagatgaggactcacaggccttgg

SEQ ID NO: 6292 - DNA, 28 bp, synthetic construct
  source 1..28: mol_type = other DNA
ttcatggtatgagatgaggactcacagg

SEQ ID NO: 6293 - DNA, 28 bp, synthetic construct
  source 1..28: mol_type = other DNA
agtctggctttcatggtatgagatgagg

SEQ ID NO: 6294 - DNA, 28 bp, synthetic construct
  source 1..28: mol_type = other DNA
ccatgaaagccagactgtcaaaaaaagg

SEQ ID NO: 6295 - DNA, 28 bp, synthetic construct
  source 1..28: mol_type = other DNA
catgaaagccagactgtcaaaaaaaggg

SEQ ID NO: 6296 - DNA, 28 bp, synthetic construct
  source 1..28: mol_type = other DNA
gacatgtgccctttttttgacagtctgg

SEQ ID NO: 6297 - DNA, 28 bp, synthetic construct
  source 1..28: mol_type = other DNA
aaaaagggcacatgtcactttgcaaagg

SEQ ID NO: 6298 - DNA, 28 bp, synthetic construct
  source 1..28: mol_type = other DNA
aaaggaatgtattaactcctctcccagg

SEQ ID NO: 6299 - DNA, 28 bp, synthetic construct
  source 1..28: mol_type = other DNA
aaggaatgtattaactcctctcccaggg

SEQ ID NO: 6300 - DNA, 28 bp, synthetic construct
  source 1..28: mol_type = other DNA
acgtagactaagttgaccctgggagagg

SEQ ID NO: 6301 - DNA, 28 bp, synthetic construct
  source 1..28: mol_type = other DNA
aagacacgtagactaagttgaccctggg

SEQ ID NO: 6302 - DNA, 28 bp, synthetic construct
  source 1..28: mol_type = other DNA
aaagacacgtagactaagttgaccctgg

SEQ ID NO: 6303 - DNA, 28 bp, synthetic construct
  source 1..28: mol_type = other DNA
atgactgaacatctagtagatctggtgg

SEQ ID NO: 6304 - DNA, 28 bp, synthetic construct
  source 1..28: mol_type = other DNA
gacatgactgaacatctagtagatctgg

SEQ ID NO: 6305 - DNA, 28 bp, synthetic construct
  source 1..28: mol_type = other DNA
actagatgttcagtcatgtcctttcagg

SEQ ID NO: 6306 - DNA, 28 bp, synthetic construct
  source 1..28: mol_type = other DNA
tcagtcatgtcctttcaggtcctgaagg

SEQ ID NO: 6307 - DNA, 28 bp, synthetic construct
  source 1..28: mol_type = other DNA
tcatgtcctttcaggtcctgaaggcagg

SEQ ID NO: 6308 - DNA, 28 bp, synthetic construct
  source 1..28: mol_type = other DNA
agtgagcctgccttcaggacctgaaagg

SEQ ID NO: 6309 - DNA, 28 bp, synthetic construct
  source 1..28: mol_type = other DNA
tgcatcagagagtgagcctgccttcagg

SEQ ID NO: 6310 - DNA, 28 bp, synthetic construct
  source 1..28: mol_type = other DNA
ctctctgatgcatctttttatatcatgg

SEQ ID NO: 6311 - DNA, 28 bp, synthetic construct
  source 1..28: mol_type = other DNA
tctgatgcatctttttatatcatggtgg

SEQ ID NO: 6312 - DNA, 28 bp, synthetic construct
  source 1..28: mol_type = other DNA
ctgatgcatctttttatatcatggtggg

SEQ ID NO: 6313 - DNA, 28 bp, synthetic construct
  source 1..28: mol_type = other DNA
atcatggtgggtgtgaagtgaaaagagg

SEQ ID NO: 6314 - DNA, 28 bp, synthetic construct
  source 1..28: mol_type = other DNA
agttttctaaatatggactaattgtggg

SEQ ID NO: 6315 - DNA, 28 bp, synthetic construct
  source 1..28: mol_type = other DNA
aagttttctaaatatggactaattgtgg

SEQ ID NO: 6316 - DNA, 28 bp, synthetic construct
  source 1..28: mol_type = other DNA
tagtccatatttagaaaactttctgtgg

SEQ ID NO: 6317 - DNA, 28 bp, synthetic construct
  source 1..28: mol_type = other DNA
agtccatatttagaaaactttctgtggg

SEQ ID NO: 6318 - DNA, 28 bp, synthetic construct
  source 1..28: mol_type = other DNA
gaacccacagaaagttttctaaatatgg

SEQ ID NO: 6319 - DNA, 28 bp, synthetic construct
  source 1..28: mol_type = other DNA
gttttcatttcaaatgggaaattaatgg

SEQ ID NO: 6320 - DNA, 28 bp, synthetic construct
  source 1..28: mol_type = other DNA
gaattagctggttttcatttcaaatggg

SEQ ID NO: 6321 - DNA, 28 bp, synthetic construct
  source 1..28: mol_type = other DNA
agaattagctggttttcatttcaaatgg

SEQ ID NO: 6322 - DNA, 28 bp, synthetic construct
  source 1..28: mol_type = other DNA
cagggctttagaatttagaattagctgg

SEQ ID NO: 6323 - DNA, 28 bp, synthetic construct
  source 1..28: mol_type = other DNA
cagctaattctaaattctaaagccctgg

SEQ ID NO: 6324 - DNA, 28 bp, synthetic construct
  source 1..28: mol_type = other DNA
agctaattctaaattctaaagccctggg

SEQ ID NO: 6325 - DNA, 28 bp, synthetic construct
  source 1..28: mol_type = other DNA
gctaattctaaattctaaagccctgggg

SEQ ID NO: 6326 - DNA, 28 bp, synthetic construct
  source 1..28: mol_type = other DNA
ctaattctaaattctaaagccctggggg

SEQ ID NO: 6327 - DNA, 28 bp, synthetic construct
  source 1..28: mol_type = other DNA
tctaaagccctgggggaaaccttccagg

SEQ ID NO: 6328 - DNA, 28 bp, synthetic construct
  source 1..28: mol_type = other DNA
gacaaagcctggaaggtttcccccaggg

SEQ ID NO: 6329 - DNA, 28 bp, synthetic construct
  source 1..28: mol_type = other DNA
agacaaagcctggaaggtttcccccagg

SEQ ID NO: 6330 - DNA, 28 bp, synthetic construct
  source 1..28: mol_type = other DNA
gtctgtctgatagacaaagcctggaagg

SEQ ID NO: 6331 - DNA, 28 bp, synthetic construct
  source 1..28: mol_type = other DNA
caaagtctgtctgatagacaaagcctgg

SEQ ID NO: 6332 - DNA, 28 bp, synthetic construct
  source 1..28: mol_type = other DNA
gaaaaacaaaaataaaacattacgctgg

SEQ ID NO: 6333 - DNA, 28 bp, synthetic construct
  source 1..28: mol_type = other DNA
catctatgatatgcttggtgctgttagg

SEQ ID NO: 6334 - DNA, 28 bp, synthetic construct
  source 1..28: mol_type = other DNA
atttattgagcatctatgatatgcttgg

SEQ ID NO: 6335 - DNA, 28 bp, synthetic construct
  source 1..28: mol_type = other DNA
tgtagatttattaagagtaataacatgg

SEQ ID NO: 6336 - DNA, 28 bp, synthetic construct
  source 1..28: mol_type = other DNA
agaaccaaccaccattttgtaaaatagg

SEQ ID NO: 6337 - DNA, 28 bp, synthetic construct
  source 1..28: mol_type = other DNA
tttgcctattttacaaaatggtggttgg

SEQ ID NO: 6338 - DNA, 28 bp, synthetic construct
  source 1..28: mol_type = other DNA
tagttttgcctattttacaaaatggtgg

SEQ ID NO: 6339 - DNA, 28 bp, synthetic construct
  source 1..28: mol_type = other DNA
atgtagttttgcctattttacaaaatgg

SEQ ID NO: 6340 - DNA, 28 bp, synthetic construct
  source 1..28: mol_type = other DNA
tttcacctgatttgataaagcagtgtgg

SEQ ID NO: 6341 - DNA, 28 bp, synthetic construct
  source 1..28: mol_type = other DNA
ttgctccacactgctttatcaaatcagg

SEQ ID NO: 6342 - DNA, 28 bp, synthetic construct
  source 1..28: mol_type = other DNA
gcactgttgagtgtcaaggctactgtgg

SEQ ID NO: 6343 - DNA, 28 bp, synthetic construct
  source 1..28: mol_type = other DNA
ctcttcgttgcactgttgagtgtcaagg

SEQ ID NO: 6344 - DNA, 28 bp, synthetic construct
  source 1..28: mol_type = other DNA
ttaatgtttccactgcaatatgaactgg

SEQ ID NO: 6345 - DNA, 28 bp, synthetic construct
  source 1..28: mol_type = other DNA
ctgtgggaaccagttcatattgcagtgg

SEQ ID NO: 6346 - DNA, 28 bp, synthetic construct
  source 1..28: mol_type = other DNA
atatgaactggttcccacagctcttagg

SEQ ID NO: 6347 - DNA, 28 bp, synthetic construct
  source 1..28: mol_type = other DNA
ttacactctatctcctaagagctgtggg

SEQ ID NO: 6348 - DNA, 28 bp, synthetic construct
  source 1..28: mol_type = other DNA
attacactctatctcctaagagctgtgg

SEQ ID NO: 6349 - DNA, 28 bp, synthetic construct
  source 1..28: mol_type = other DNA
aggagatagagtgtaatcacttaaatgg

SEQ ID NO: 6350 - DNA, 28 bp, synthetic construct
  source 1..28: mol_type = other DNA
ggagatagagtgtaatcacttaaatggg

SEQ ID NO: 6351 - DNA, 28 bp, synthetic construct
  source 1..28: mol_type = other DNA
atgaactctaattccacttgagaaaagg

SEQ ID NO: 6352 - DNA, 28 bp, synthetic construct
  source 1..28: mol_type = other DNA
tgaacataacataccttttctcaagtgg

SEQ ID NO: 6353 - DNA, 28 bp, synthetic construct
  source 1..28: mol_type = other DNA
tatctgaaaattattaatatatttcagg

SEQ ID NO: 6354 - DNA, 28 bp, synthetic construct
  source 1..28: mol_type = other DNA
atctgaaaattattaatatatttcaggg

SEQ ID NO: 6355 - DNA, 28 bp, synthetic construct
  source 1..28: mol_type = other DNA
aaattattaatatatttcagggagatgg

SEQ ID NO: 6356 - DNA, 28 bp, synthetic construct
  source 1..28: mol_type = other DNA
attactttgagggatgctgaatgagagg

SEQ ID NO: 6357 - DNA, 28 bp, synthetic construct
  source 1..28: mol_type = other DNA
cattcagcatccctcaaagtaatgcagg

SEQ ID NO: 6358 - DNA, 28 bp, synthetic construct
  source 1..28: mol_type = other DNA
gatacttatgcctgcattactttgaggg

SEQ ID NO: 6359 - DNA, 28 bp, synthetic construct
  source 1..28: mol_type = other DNA
tgatacttatgcctgcattactttgagg

SEQ ID NO: 6360 - DNA, 28 bp, synthetic construct
  source 1..28: mol_type = other DNA
tcaaagtaatgcaggcataagtatcagg

SEQ ID NO: 6361 - DNA, 28 bp, synthetic construct
  source 1..28: mol_type = other DNA
caaagtaatgcaggcataagtatcaggg

SEQ ID NO: 6362 - DNA, 28 bp, synthetic construct
  source 1..28: mol_type = other DNA
aaagtaatgcaggcataagtatcagggg

SEQ ID NO: 6363 - DNA, 28 bp, synthetic construct
  source 1..28: mol_type = other DNA
aatgctgtactgaagttatataacaagg

SEQ ID NO: 6364 - DNA, 28 bp, synthetic construct
  source 1..28: mol_type = other DNA
tattagaaagcagctactacagatgtgg

SEQ ID NO: 6365 - DNA, 28 bp, synthetic construct
  source 1..28: mol_type = other DNA
tagatttttacagttgtgacacccctgg

SEQ ID NO: 6366 - DNA, 28 bp, synthetic construct
  source 1..28: mol_type = other DNA
agatttttacagttgtgacacccctggg

SEQ ID NO: 6367 - DNA, 28 bp, synthetic construct
  source 1..28: mol_type = other DNA
catattctcatgtctgtcatcccagggg

SEQ ID NO: 6368 - DNA, 28 bp, synthetic construct
  source 1..28: mol_type = other DNA
ccctgggatgacagacatgagaatatgg

SEQ ID NO: 6369 - DNA, 28 bp, synthetic construct
  source 1..28: mol_type = other DNA
tccatattctcatgtctgtcatcccagg

SEQ ID NO: 6370 - DNA, 28 bp, synthetic construct
  source 1..28: mol_type = other DNA
tgggatgacagacatgagaatatggagg

SEQ ID NO: 6371 - DNA, 28 bp, synthetic construct
  source 1..28: mol_type = other DNA
cagacatgagaatatggaggattaaagg

SEQ ID NO: 6372 - DNA, 28 bp, synthetic construct
  source 1..28: mol_type = other DNA
aaaggttacaaaacttaaacaaaaaagg

SEQ ID NO: 6373 - DNA, 28 bp, synthetic construct
  source 1..28: mol_type = other DNA
aaggttacaaaacttaaacaaaaaaggg

SEQ ID NO: 6374 - DNA, 28 bp, synthetic construct
  source 1..28: mol_type = other DNA
tgtaaggggttttcacataacatagagg

SEQ ID NO: 6375 - DNA, 28 bp, synthetic construct
  source 1..28: mol_type = other DNA
atgttatgtgaaaaccccttacaaaagg

SEQ ID NO: 6376 - DNA, 28 bp, synthetic construct
  source 1..28: mol_type = other DNA
ttgtcaataaactgccttttgtaagggg

SEQ ID NO: 6377 - DNA, 28 bp, synthetic construct
  source 1..28: mol_type = other DNA
tttgtcaataaactgccttttgtaaggg

SEQ ID NO: 6378 - DNA, 28 bp, synthetic construct
  source 1..28: mol_type = other DNA
atttgtcaataaactgccttttgtaagg

SEQ ID NO: 6379 - DNA, 28 bp, synthetic construct
  source 1..28: mol_type = other DNA
tgacaaataaatgctttatacattcagg

SEQ ID NO: 6380 - DNA, 28 bp, synthetic construct
  source 1..28: mol_type = other DNA
ggtttttcccatctctcaatagtgatgg

SEQ ID NO: 6381 - DNA, 28 bp, synthetic construct
  source 1..28: mol_type = other DNA
ttggaaaccatcactattgagagatggg

SEQ ID NO: 6382 - DNA, 28 bp, synthetic construct
  source 1..28: mol_type = other DNA
tttggaaaccatcactattgagagatgg

SEQ ID NO: 6383 - DNA, 28 bp, synthetic construct
  source 1..28: mol_type = other DNA
attcttcactactgagtttcttctttgg

SEQ ID NO: 6384 - DNA, 28 bp, synthetic construct
  source 1..28: mol_type = other DNA
ttctctcattcacaagatgctttgaagg

SEQ ID NO: 6385 - DNA, 28 bp, synthetic construct
  source 1..28: mol_type = other DNA
caaagcatcttgtgaatgagagaaatgg

SEQ ID NO: 6386 - DNA, 28 bp, synthetic construct
  source 1..28: mol_type = other DNA
atcttgtgaatgagagaaatggaactgg

SEQ ID NO: 6387 - DNA, 28 bp, synthetic construct
  source 1..28: mol_type = other DNA
tgaatgagagaaatggaactggacctgg

SEQ ID NO: 6388 - DNA, 28 bp, synthetic construct
  source 1..28: mol_type = other DNA
gaatgagagaaatggaactggacctggg

SEQ ID NO: 6389 - DNA, 28 bp, synthetic construct
  source 1..28: mol_type = other DNA
agagaaatggaactggacctgggcaagg

SEQ ID NO: 6390 - DNA, 28 bp, synthetic construct
  source 1..28: mol_type = other DNA
aatggaactggacctgggcaaggcatgg

SEQ ID NO: 6391 - DNA, 28 bp, synthetic construct
  source 1..28: mol_type = other DNA
atggaactggacctgggcaaggcatggg

SEQ ID NO: 6392 - DNA, 28 bp, synthetic construct
  source 1..28: mol_type = other DNA
tggaactggacctgggcaaggcatgggg

SEQ ID NO: 6393 - DNA, 28 bp, synthetic construct
  source 1..28: mol_type = other DNA
actggacctgggcaaggcatggggatgg

SEQ ID NO: 6394 - DNA, 28 bp, synthetic construct
  source 1..28: mol_type = other DNA
tctctaccatccccatgccttgcccagg

SEQ ID NO: 6395 - DNA, 28 bp, synthetic construct
  source 1..28: mol_type = other DNA
tcaacagctaaatcatttattcatatgg

SEQ ID NO: 6396 - DNA, 28 bp, synthetic construct
  source 1..28: mol_type = other DNA
tgaataaatgatttagctgttgatgtgg

SEQ ID NO: 6397 - DNA, 28 bp, synthetic construct
  source 1..28: mol_type = other DNA
ctgttgatgtggacagcaagagagttgg

SEQ ID NO: 6398 - DNA, 28 bp, synthetic construct
  source 1..28: mol_type = other DNA
ttgatgtggacagcaagagagttggtgg

SEQ ID NO: 6399 - DNA, 28 bp, synthetic construct
  source 1..28: mol_type = other DNA
tgatgtggacagcaagagagttggtggg

SEQ ID NO: 6400 - DNA, 28 bp, synthetic construct
  source 1..28: mol_type = other DNA
tacagcagacctgaccacgctacaaagg

SEQ ID NO: 6401 - DNA, 28 bp, synthetic construct
  source 1..28: mol_type = other DNA
acagcagacctgaccacgctacaaaggg

SEQ ID NO: 6402 - DNA, 28 bp, synthetic construct
  source 1..28: mol_type = other DNA
ttcacagaccctttgtagcgtggtcagg

SEQ ID NO: 6403 - DNA, 28 bp, synthetic construct
  source 1..28: mol_type = other DNA
tgttcttcacagaccctttgtagcgtgg

SEQ ID NO: 6404 - DNA, 28 bp, synthetic construct
  source 1..28: mol_type = other DNA
aaagggtctgtgaagaacacagtacagg

SEQ ID NO: 6405 - DNA, 28 bp, synthetic construct
  source 1..28: mol_type = other DNA
tcttgtttttagtttagttttgttttgg

SEQ ID NO: 6406 - DNA, 28 bp, synthetic construct
  source 1..28: mol_type = other DNA
ctgcaactttgccaaactgtaaacaagg

SEQ ID NO: 6407 - DNA, 28 bp, synthetic construct
  source 1..28: mol_type = other DNA
gaaatgctttaccttgtttacagtttgg

SEQ ID NO: 6408 - DNA, 28 bp, synthetic construct
  source 1..28: mol_type = other DNA
ctgtaaacaaggtaaagcatttcacagg

SEQ ID NO: 6409 - DNA, 28 bp, synthetic construct
  source 1..28: mol_type = other DNA
aagcatttcacaggttcaaagttcaagg

SEQ ID NO: 6410 - DNA, 28 bp, synthetic construct
  source 1..28: mol_type = other DNA
agcatttcacaggttcaaagttcaaggg

SEQ ID NO: 6411 - DNA, 28 bp, synthetic construct
  source 1..28: mol_type = other DNA
tcagttcaaccctgatttaaaaatatgg

SEQ ID NO: 6412 - DNA, 28 bp, synthetic construct
  source 1..28: mol_type = other DNA
ttttgctagccatatttttaaatcaggg

SEQ ID NO: 6413 - DNA, 28 bp, synthetic construct
  source 1..28: mol_type = other DNA
tttttgctagccatatttttaaatcagg

SEQ ID NO: 6414 - DNA, 28 bp, synthetic construct
  source 1..28: mol_type = other DNA
tttaaaaatatggctagcaaaaacaagg

SEQ ID NO: 6415 - DNA, 28 bp, synthetic construct
  source 1..28: mol_type = other DNA
tgcttgctcaggatgtcgacagctgtgg

SEQ ID NO: 6416 - DNA, 28 bp, synthetic construct
  source 1..28: mol_type = other DNA
agctgtcgacatcctgagcaagcatcgg

SEQ ID NO: 6417 - DNA, 28 bp, synthetic construct
  source 1..28: mol_type = other DNA
tctcaaaggagaccgatgcttgctcagg

SEQ ID NO: 6418 - DNA, 28 bp, synthetic construct
  source 1..28: mol_type = other DNA
gaggcttgggagtgcagcttctcaaagg

SEQ ID NO: 6419 - DNA, 28 bp, synthetic construct
  source 1..28: mol_type = other DNA
cgtgtagcagcttgagaagaggcttggg

SEQ ID NO: 6420 - DNA, 28 bp, synthetic construct
  source 1..28: mol_type = other DNA
tcgtgtagcagcttgagaagaggcttgg

SEQ ID NO: 6421 - DNA, 28 bp, synthetic construct
  source 1..28: mol_type = other DNA
aagcctcttctcaagctgctacacgagg

SEQ ID NO: 6422 - DNA, 28 bp, synthetic construct
  source 1..28: mol_type = other DNA
cctcttctcaagctgctacacgaggagg

SEQ ID NO: 6423 - DNA, 28 bp, synthetic construct
  source 1..28: mol_type = other DNA
agtgtggaaataaagagaactgagatgg

SEQ ID NO: 6424 - DNA, 28 bp, synthetic construct
  source 1..28: mol_type = other DNA
tcagttctctttatttccacactcttgg

SEQ ID NO: 6425 - DNA, 28 bp, synthetic construct
  source 1..28: mol_type = other DNA
aagcaatcgatgtattccaagagtgtgg

SEQ ID NO: 6426 - DNA, 28 bp, synthetic construct
  source 1..28: mol_type = other DNA
ggaatacatcgattgctttccattttgg

SEQ ID NO: 6427 - DNA, 28 bp, synthetic construct
  source 1..28: mol_type = other DNA
ctttccattttggtgtctacagttctgg

SEQ ID NO: 6428 - DNA, 28 bp, synthetic construct
  source 1..28: mol_type = other DNA
gcagccagaactgtagacaccaaaatgg

SEQ ID NO: 6429 - DNA, 28 bp, synthetic construct
  source 1..28: mol_type = other DNA
gttctggctgctatagatttagacgtgg

SEQ ID NO: 6430 - DNA, 28 bp, synthetic construct
  source 1..28: mol_type = other DNA
ttctggctgctatagatttagacgtggg

SEQ ID NO: 6431 - DNA, 28 bp, synthetic construct
  source 1..28: mol_type = other DNA
tctggctgctatagatttagacgtgggg

SEQ ID NO: 6432 - DNA, 28 bp, synthetic construct
  source 1..28: mol_type = other DNA
gctatagatttagacgtggggatactgg

SEQ ID NO: 6433 - DNA, 28 bp, synthetic construct
  source 1..28: mol_type = other DNA
atagatttagacgtggggatactggagg

SEQ ID NO: 6434 - DNA, 28 bp, synthetic construct
  source 1..28: mol_type = other DNA
gatttagacgtggggatactggaggagg

SEQ ID NO: 6435 - DNA, 28 bp, synthetic construct
  source 1..28: mol_type = other DNA
atttagacgtggggatactggaggaggg

SEQ ID NO: 6436 - DNA, 28 bp, synthetic construct
  source 1..28: mol_type = other DNA
agacgtggggatactggaggagggaagg

SEQ ID NO: 6437 - DNA, 28 bp, synthetic construct
  source 1..28: mol_type = other DNA
tactggaggagggaaggcaaattctcgg

SEQ ID NO: 6438 - DNA, 28 bp, synthetic construct
  source 1..28: mol_type = other DNA
tggaggagggaaggcaaattctcggagg

SEQ ID NO: 6439 - DNA, 28 bp, synthetic construct
  source 1..28: mol_type = other DNA
gaaggcaaattctcggaggatgctccgg

SEQ ID NO: 6440 - DNA, 28 bp, synthetic construct
  source 1..28: mol_type = other DNA
aaggcaaattctcggaggatgctccggg

SEQ ID NO: 6441 - DNA, 28 bp, synthetic construct
  source 1..28: mol_type = other DNA
gctccgggcaacttcgacattattctgg

SEQ ID NO: 6442 - DNA, 28 bp, synthetic construct
  source 1..28: mol_type = other DNA
ctccgggcaacttcgacattattctggg

SEQ ID NO: 6443 - DNA, 28 bp, synthetic construct
  source 1..28: mol_type = other DNA
agcccagaataatgtcgaagttgcccgg

SEQ ID NO: 6444 - DNA, 28 bp, synthetic construct
  source 1..28: mol_type = other DNA
tcgacattattctgggctatctctaagg

SEQ ID NO: 6445 - DNA, 28 bp, synthetic construct
  source 1..28: mol_type = other DNA
tctaaggctctcttcacctcttcaaagg

SEQ ID NO: 6446 - DNA, 28 bp, synthetic construct
  source 1..28: mol_type = other DNA
atgggagagggttatgcctttgaagagg

SEQ ID NO: 6447 - DNA, 28 bp, synthetic construct
  source 1..28: mol_type = other DNA
caaaaattgcaaaactcatgggagaggg

SEQ ID NO: 6448 - DNA, 28 bp, synthetic construct
  source 1..28: mol_type = other DNA
gcaaaaattgcaaaactcatgggagagg

SEQ ID NO: 6449 - DNA, 28 bp, synthetic construct
  source 1..28: mol_type = other DNA
tcgatgcaaaaattgcaaaactcatggg

SEQ ID NO: 6450 - DNA, 28 bp, synthetic construct
  source 1..28: mol_type = other DNA
gtcgatgcaaaaattgcaaaactcatgg

SEQ ID NO: 6451 - DNA, 28 bp, synthetic construct
  source 1..28: mol_type = other DNA
catcgacattttccaatgccgcctcagg

SEQ ID NO: 6452 - DNA, 28 bp, synthetic construct
  source 1..28: mol_type = other DNA
attttccaatgccgcctcaggcccatgg

SEQ ID NO: 6453 - DNA, 28 bp, synthetic construct
  source 1..28: mol_type = other DNA
ttttccaatgccgcctcaggcccatggg

SEQ ID NO: 6454 - DNA, 28 bp, synthetic construct
  source 1..28: mol_type = other DNA
tttccaatgccgcctcaggcccatgggg

SEQ ID NO: 6455 - DNA, 28 bp, synthetic construct
  source 1..28: mol_type = other DNA
aaaccccatgggcctgaggcggcattgg

SEQ ID NO: 6456 - DNA, 28 bp, synthetic construct
  source 1..28: mol_type = other DNA
cacagaaaaccccatgggcctgaggcgg

SEQ ID NO: 6457 - DNA, 28 bp, synthetic construct
  source 1..28: mol_type = other DNA
cgcctcaggcccatggggttttctgtgg

SEQ ID NO: 6458 - DNA, 28 bp, synthetic construct
  source 1..28: mol_type = other DNA
caccacagaaaaccccatgggcctgagg

SEQ ID NO: 6459 - DNA, 28 bp, synthetic construct
  source 1..28: mol_type = other DNA
agaaattcaccacagaaaaccccatggg

SEQ ID NO: 6460 - DNA, 28 bp, synthetic construct
  source 1..28: mol_type = other DNA
cagaaattcaccacagaaaaccccatgg

SEQ ID NO: 6461 - DNA, 28 bp, synthetic construct
  source 1..28: mol_type = other DNA
catggggttttctgtggtgaatttctgg

SEQ ID NO: 6462 - DNA, 28 bp, synthetic construct
  source 1..28: mol_type = other DNA
ggtgaatttctggtgcagtcctgcgcgg

SEQ ID NO: 6463 - DNA, 28 bp, synthetic construct
  source 1..28: mol_type = other DNA
tttctggtgcagtcctgcgcggtcgtgg

SEQ ID NO: 6464 - DNA, 28 bp, synthetic construct
  source 1..28: mol_type = other DNA
gtgcagtcctgcgcggtcgtggtttagg

SEQ ID NO: 6465 - DNA, 28 bp, synthetic construct
  source 1..28: mol_type = other DNA
tgcagtcctgcgcggtcgtggtttaggg

SEQ ID NO: 6466 - DNA, 28 bp, synthetic construct
  source 1..28: mol_type = other DNA
gcagtcctgcgcggtcgtggtttagggg

SEQ ID NO: 6467 - DNA, 28 bp, synthetic construct
  source 1..28: mol_type = other DNA
cagtcctgcgcggtcgtggtttaggggg

SEQ ID NO: 6468 - DNA, 28 bp, synthetic construct
  source 1..28: mol_type = other DNA
cagaccccctaaaccacgaccgcgcagg

SEQ ID NO: 6469 - DNA, 28 bp, synthetic construct
  source 1..28: mol_type = other DNA
ctgcgcggtcgtggtttagggggtctgg

SEQ ID NO: 6470 - DNA, 28 bp, synthetic construct
  source 1..28: mol_type = other DNA
gcggtcgtggtttagggggtctggctgg

SEQ ID NO: 6471 - DNA, 28 bp, synthetic construct
  source 1..28: mol_type = other DNA
ttaaaaatctacacagatggttcacagg

SEQ ID NO: 6472 - DNA, 28 bp, synthetic construct
  source 1..28: mol_type = other DNA
atctctctttaaaaatctacacagatgg

SEQ ID NO: 6473 - DNA, 28 bp, synthetic construct
  source 1..28: mol_type = other DNA
tactagccaactcacctgaacatgaagg

SEQ ID NO: 6474 - DNA, 28 bp, synthetic construct
  source 1..28: mol_type = other DNA
cagcttccttcatgttcaggtgagttgg

SEQ ID NO: 6475 - DNA, 28 bp, synthetic construct
  source 1..28: mol_type = other DNA
actatgatcagcttccttcatgttcagg

SEQ ID NO: 6476 - DNA, 28 bp, synthetic construct
  source 1..28: mol_type = other DNA
aatgtcaaaactaacagaacatcacagg

SEQ ID NO: 6477 - DNA, 28 bp, synthetic construct
  source 1..28: mol_type = other DNA
ttctgttagttttgacattttcacctgg

SEQ ID NO: 6478 - DNA, 28 bp, synthetic construct
  source 1..28: mol_type = other DNA
cattttcacctggtaaccttctagcagg

SEQ ID NO: 6479 - DNA, 28 bp, synthetic construct
  source 1..28: mol_type = other DNA
tttcacctggtaaccttctagcaggagg

SEQ ID NO: 6480 - DNA, 28 bp, synthetic construct
  source 1..28: mol_type = other DNA
ctttgcctcctgctagaaggttaccagg

SEQ ID NO: 6481 - DNA, 28 bp, synthetic construct
  source 1..28: mol_type = other DNA
ctggtaaccttctagcaggaggcaaagg

SEQ ID NO: 6482 - DNA, 28 bp, synthetic construct
  source 1..28: mol_type = other DNA
ccttctagcaggaggcaaaggaacttgg

SEQ ID NO: 6483 - DNA, 28 bp, synthetic construct
  source 1..28: mol_type = other DNA
acttggccacttgctagatcaacaaagg

SEQ ID NO: 6484 - DNA, 28 bp, synthetic construct
  source 1..28: mol_type = other DNA
cttggccacttgctagatcaacaaaggg

SEQ ID NO: 6485 - DNA, 28 bp, synthetic construct
  source 1..28: mol_type = other DNA
aagatccctttgttgatctagcaagtgg

SEQ ID NO: 6486 - DNA, 28 bp, synthetic construct
  source 1..28: mol_type = other DNA
agtaaaatgtgataatttaccaccttgg

SEQ ID NO: 6487 - DNA, 28 bp, synthetic construct
  source 1..28: mol_type = other DNA
aatttaccaccttggcagtcagagacgg

SEQ ID NO: 6488 - DNA, 28 bp, synthetic construct
  source 1..28: mol_type = other DNA
atttaccaccttggcagtcagagacggg

SEQ ID NO: 6489 - DNA, 28 bp, synthetic construct
  source 1..28: mol_type = other DNA
tttaccaccttggcagtcagagacgggg

SEQ ID NO: 6490 - DNA, 28 bp, synthetic construct
  source 1..28: mol_type = other DNA
gatgccccgtctctgactgccaaggtgg

SEQ ID NO: 6491 - DNA, 28 bp, synthetic construct
  source 1..28: mol_type = other DNA
tcagatgccccgtctctgactgccaagg

SEQ ID NO: 6492 - DNA, 28 bp, synthetic construct
  source 1..28: mol_type = other DNA
agtaaaaaatatgatatttactaactgg

SEQ ID NO: 6493 - DNA, 28 bp, synthetic construct
  source 1..28: mol_type = other DNA
tatgatatttactaactggaactaaagg

SEQ ID NO: 6494 - DNA, 28 bp, synthetic construct
  source 1..28: mol_type = other DNA
atgatatttactaactggaactaaaggg

SEQ ID NO: 6495 - DNA, 28 bp, synthetic construct
  source 1..28: mol_type = other DNA
aaatcattaataccataaacccaactgg

SEQ ID NO: 6496 - DNA, 28 bp, synthetic construct
  source 1..28: mol_type = other DNA
atgaatgttaaaccagttgggtttatgg

SEQ ID NO: 6497 - DNA, 28 bp, synthetic construct
  source 1..28: mol_type = other DNA
taatactatgaatgttaaaccagttggg

SEQ ID NO: 6498 - DNA, 28 bp, synthetic construct
  source 1..28: mol_type = other DNA
ataatactatgaatgttaaaccagttgg

SEQ ID NO: 6499 - DNA, 28 bp, synthetic construct
  source 1..28: mol_type = other DNA
ctggtttaacattcatagtattatatgg

SEQ ID NO: 6500 - DNA, 28 bp, synthetic construct
  source 1..28: mol_type = other DNA
tggtttaacattcatagtattatatggg

SEQ ID NO: 6501 - DNA, 28 bp, synthetic construct
  source 1..28: mol_type = other DNA
gatgtaatgtttgtctactcaaaaaggg

SEQ ID NO: 6502 - DNA, 28 bp, synthetic construct
  source 1..28: mol_type = other DNA
agatgtaatgtttgtctactcaaaaagg

SEQ ID NO: 6503 - DNA, 28 bp, synthetic construct
  source 1..28: mol_type = other DNA
agacaaacattacatctgaaaaccttgg

SEQ ID NO: 6504 - DNA, 28 bp, synthetic construct
  source 1..28: mol_type = other DNA
agctagataaattattagtgaaccaagg

SEQ ID NO: 6505 - DNA, 28 bp, synthetic construct
  source 1..28: mol_type = other DNA
tttatctagctatcactcccacctcagg

SEQ ID NO: 6506 - DNA, 28 bp, synthetic construct
  source 1..28: mol_type = other DNA
agaggaaagcagcggtgcctgaggtggg

SEQ ID NO: 6507 - DNA, 28 bp, synthetic construct
  source 1..28: mol_type = other DNA
gagaggaaagcagcggtgcctgaggtgg

SEQ ID NO: 6508 - DNA, 28 bp, synthetic construct
  source 1..28: mol_type = other DNA
tatgagaggaaagcagcggtgcctgagg

SEQ ID NO: 6509 - DNA, 28 bp, synthetic construct
  source 1..28: mol_type = other DNA
taaaagtactatgagaggaaagcagcgg

SEQ ID NO: 6510 - DNA, 28 bp, synthetic construct
  source 1..28: mol_type = other DNA
atcgacaacataaaagtactatgagagg

SEQ ID NO: 6511 - DNA, 28 bp, synthetic construct
  source 1..28: mol_type = other DNA
tctgaaagtaccgtcaattcttctgagg

SEQ ID NO: 6512 - DNA, 28 bp, synthetic construct
  source 1..28: mol_type = other DNA
aagtaccgtcaattcttctgaggacagg

SEQ ID NO: 6513 - DNA, 28 bp, synthetic construct
  source 1..28: mol_type = other DNA
agtaccgtcaattcttctgaggacaggg

SEQ ID NO: 6514 - DNA, 28 bp, synthetic construct
  source 1..28: mol_type = other DNA
agatccctgtcctcagaagaattgacgg

SEQ ID NO: 6515 - DNA, 28 bp, synthetic construct
  source 1..28: mol_type = other DNA
caattcttctgaggacagggatctgagg

SEQ ID NO: 6516 - DNA, 28 bp, synthetic construct
  source 1..28: mol_type = other DNA
aattcttctgaggacagggatctgaggg

SEQ ID NO: 6517 - DNA, 28 bp, synthetic construct
  source 1..28: mol_type = other DNA
gaggtataattcaaacatgagaagtagg

SEQ ID NO: 6518 - DNA, 28 bp, synthetic construct
  source 1..28: mol_type = other DNA
ttctaggtgctatgtttgatttaggagg

SEQ ID NO: 6519 - DNA, 28 bp, synthetic construct
  source 1..28: mol_type = other DNA
gtgttctaggtgctatgtttgatttagg

SEQ ID NO: 6520 - DNA, 28 bp, synthetic construct
  source 1..28: mol_type = other DNA
tcaaacatagcacctagaacactcttgg

SEQ ID NO: 6521 - DNA, 28 bp, synthetic construct
  source 1..28: mol_type = other DNA
gcaagctatttgccaagagtgttctagg

SEQ ID NO: 6522 - DNA, 28 bp, synthetic construct
  source 1..28: mol_type = other DNA
atctgaatttgtgtggatttatttgtgg

SEQ ID NO: 6523 - DNA, 28 bp, synthetic construct
  source 1..28: mol_type = other DNA
aaattgtgaacaatctgaatttgtgtgg

SEQ ID NO: 6524 - DNA, 28 bp, synthetic construct
  source 1..28: mol_type = other DNA
aatttttgctttacattagcaattcagg

SEQ ID NO: 6525 - DNA, 28 bp, synthetic construct
  source 1..28: mol_type = other DNA
gaagttaaaacaatgaaattcaatcggg

SEQ ID NO: 6526 - DNA, 28 bp, synthetic construct
  source 1..28: mol_type = other DNA
ggaagttaaaacaatgaaattcaatcgg

SEQ ID NO: 6527 - DNA, 28 bp, synthetic construct
  source 1..28: mol_type = other DNA
tacatattattaatgtctaagggagtgg

SEQ ID NO: 6528 - DNA, 28 bp, synthetic construct
  source 1..28: mol_type = other DNA
atacttacatattattaatgtctaaggg

SEQ ID NO: 6529 - DNA, 28 bp, synthetic construct
  source 1..28: mol_type = other DNA
aatacttacatattattaatgtctaagg

SEQ ID NO: 6530 - DNA, 28 bp, synthetic construct
  source 1..28: mol_type = other DNA
atttgattacttacgatgaaaacatagg

SEQ ID NO: 6531 - DNA, 28 bp, synthetic construct
  source 1..28: mol_type = other DNA
gactatttttatattagtttttgactgg

SEQ ID NO: 6532 - DNA, 28 bp, synthetic construct
  source 1..28: mol_type = other DNA
tattagtttttgactggataatgtaagg

SEQ ID NO: 6533 - DNA, 28 bp, synthetic construct
  source 1..28: mol_type = other DNA
agtttttgactggataatgtaaggcagg

SEQ ID NO: 6534 - DNA, 28 bp, synthetic construct
  source 1..28: mol_type = other DNA
gaagccattatcttttcaccttttttgg

SEQ ID NO: 6535 - DNA, 28 bp, synthetic construct
  source 1..28: mol_type = other DNA
tactccaaaaaaggtgaaaagataatgg

SEQ ID NO: 6536 - DNA, 28 bp, synthetic construct
  source 1..28: mol_type = other DNA
ggtgataattattatactccaaaaaagg

SEQ ID NO: 6537 - DNA, 28 bp, synthetic construct
  source 1..28: mol_type = other DNA
ataataattatcaccagctttgctgagg

SEQ ID NO: 6538 - DNA, 28 bp, synthetic construct
  source 1..28: mol_type = other DNA
taagtcaaaaagtcctcagcaaagctgg

SEQ ID NO: 6539 - DNA, 28 bp, synthetic construct
  source 1..28: mol_type = other DNA
tgctgaggactttttgacttagacaagg

SEQ ID NO: 6540 - DNA, 28 bp, synthetic construct
  source 1..28: mol_type = other DNA
tttgagttttcaatatttgaagaattgg

SEQ ID NO: 6541 - DNA, 28 bp, synthetic construct
  source 1..28: mol_type = other DNA
gagttttcaatatttgaagaattggtgg

SEQ ID NO: 6542 - DNA, 28 bp, synthetic construct
  source 1..28: mol_type = other DNA
aatatttctggaaaattaatggagctgg

SEQ ID NO: 6543 - DNA, 28 bp, synthetic construct
  source 1..28: mol_type = other DNA
ccattaattttccagaaatatttttagg

SEQ ID NO: 6544 - DNA, 28 bp, synthetic construct
  source 1..28: mol_type = other DNA
taattttccagaaatatttttaggaagg

SEQ ID NO: 6545 - DNA, 28 bp, synthetic construct
  source 1..28: mol_type = other DNA
tctcattccttcctaaaaatatttctgg

SEQ ID NO: 6546 - DNA, 28 bp, synthetic construct
  source 1..28: mol_type = other DNA
atcgcatgagacaatgttgatcttttgg

SEQ ID NO: 6547 - DNA, 28 bp, synthetic construct
  source 1..28: mol_type = other DNA
tcttttggtttgttagagaaaccaaagg

SEQ ID NO: 6548 - DNA, 28 bp, synthetic construct
  source 1..28: mol_type = other DNA
ttagagaaaccaaaggaaacaaatatgg

SEQ ID NO: 6549 - DNA, 28 bp, synthetic construct
  source 1..28: mol_type = other DNA
ctgaaatcaccatatttgtttcctttgg

SEQ ID NO: 6550 - DNA, 28 bp, synthetic construct
  source 1..28: mol_type = other DNA
atgaaatatctagtgcaaaatctttggg

SEQ ID NO: 6551 - DNA, 28 bp, synthetic construct
  source 1..28: mol_type = other DNA
tatgaaatatctagtgcaaaatctttgg

SEQ ID NO: 6552 - DNA, 28 bp, synthetic construct
  source 1..28: mol_type = other DNA
ctagatatttcataaaatttactttagg

SEQ ID NO: 6553 - DNA, 28 bp, synthetic construct
  source 1..28: mol_type = other DNA
tgcccctgatacaacattaagtcagagg

SEQ ID NO: 6554 - DNA, 28 bp, synthetic construct
  source 1..28: mol_type = other DNA
ttcctctgacttaatgttgtatcagggg

SEQ ID NO: 6555 - DNA, 28 bp, synthetic construct
  source 1..28: mol_type = other DNA
tttcctctgacttaatgttgtatcaggg

SEQ ID NO: 6556 - DNA, 28 bp, synthetic construct
  source 1..28: mol_type = other DNA
ctttcctctgacttaatgttgtatcagg

SEQ ID NO: 6557 - DNA, 28 bp, synthetic construct
  source 1..28: mol_type = other DNA
atacatacacttgcttatttctttacgg

SEQ ID NO: 6558 - DNA, 28 bp, synthetic construct
  source 1..28: mol_type = other DNA
tacatacacttgcttatttctttacggg

SEQ ID NO: 6559 - DNA, 28 bp, synthetic construct
  source 1..28: mol_type = other DNA
gcttatttctttacgggaaatttatagg

SEQ ID NO: 6560 - DNA, 28 bp, synthetic construct
  source 1..28: mol_type = other DNA
ctatttctaatcatctatttatttaagg

SEQ ID NO: 6561 - DNA, 28 bp, synthetic construct
  source 1..28: mol_type = other DNA
ttatttaaggttaaaaagtaaactctgg

SEQ ID NO: 6562 - DNA, 28 bp, synthetic construct
  source 1..28: mol_type = other DNA
agtggtatattttatagtctatgtatgg

SEQ ID NO: 6563 - DNA, 28 bp, synthetic construct
  source 1..28: mol_type = other DNA
agtttaatggaagaatatagtacagtgg

SEQ ID NO: 6564 - DNA, 28 bp, synthetic construct
  source 1..28: mol_type = other DNA
cttccattaaactatattatttaaaagg

SEQ ID NO: 6565 - DNA, 28 bp, synthetic construct
  source 1..28: mol_type = other DNA
gtaccttttaaataatatagtttaatgg

SEQ ID NO: 6566 - DNA, 28 bp, synthetic construct
  source 1..28: mol_type = other DNA
tataaatagcaaaaatacctgcttatgg

SEQ ID NO: 6567 - DNA, 28 bp, synthetic construct
  source 1..28: mol_type = other DNA
aatgattcaaaacagaaccataagcagg

SEQ ID NO: 6568 - DNA, 28 bp, synthetic construct
  source 1..28: mol_type = other DNA
cctaagtttgctatttgtcagccatagg

SEQ ID NO: 6569 - DNA, 28 bp, synthetic construct
  source 1..28: mol_type = other DNA
ctaagtttgctatttgtcagccataggg

SEQ ID NO: 6570 - DNA, 28 bp, synthetic construct
  source 1..28: mol_type = other DNA
gctatttgtcagccatagggtaaactgg

SEQ ID NO: 6571 - DNA, 28 bp, synthetic construct
  source 1..28: mol_type = other DNA
ctatttgtcagccatagggtaaactggg

SEQ ID NO: 6572 - DNA, 28 bp, synthetic construct
  source 1..28: mol_type = other DNA
gctttagagagcccagtttaccctatgg

SEQ ID NO: 6573 - DNA, 28 bp, synthetic construct
  source 1..28: mol_type = other DNA
ggctctctaaagcaaattataaagttgg

SEQ ID NO: 6574 - DNA, 28 bp, synthetic construct
  source 1..28: mol_type = other DNA
gcaaattataaagttggaagcattcagg

SEQ ID NO: 6575 - DNA, 28 bp, synthetic construct
  source 1..28: mol_type = other DNA
aaagttggaagcattcaggctttaaagg

SEQ ID NO: 6576 - DNA, 28 bp, synthetic construct
  source 1..28: mol_type = other DNA
aagttggaagcattcaggctttaaaggg

SEQ ID NO: 6577 - DNA, 28 bp, synthetic construct
  source 1..28: mol_type = other DNA
gattacaggtgtgcaccactacactcgg

SEQ ID NO: 6578 - DNA, 28 bp, synthetic construct
  source 1..28: mol_type = other DNA
tgcacacctgtaatcccagctacttagg

SEQ ID NO: 6579 - DNA, 28 bp, synthetic construct
  source 1..28: mol_type = other DNA
gcacacctgtaatcccagctacttaggg

SEQ ID NO: 6580 - DNA, 28 bp, synthetic construct
  source 1..28: mol_type = other DNA
cacacctgtaatcccagctacttagggg

SEQ ID NO: 6581 - DNA, 28 bp, synthetic construct
  source 1..28: mol_type = other DNA
acacctgtaatcccagctacttaggggg

SEQ ID NO: 6582 - DNA, 28 bp, synthetic construct
  source 1..28: mol_type = other DNA
ctaccccctaagtagctgggattacagg

SEQ ID NO: 6583 - DNA, 28 bp, synthetic construct
  source 1..28: mol_type = other DNA
gtaatcccagctacttagggggtagagg

SEQ ID NO: 6584 - DNA, 28 bp, synthetic construct
  source 1..28: mol_type = other DNA
tcccagctacttagggggtagaggcagg

SEQ ID NO: 6585 - DNA, 28 bp, synthetic construct
  source 1..28: mol_type = other DNA
tcctgcctctaccccctaagtagctggg

SEQ ID NO: 6586 - DNA, 28 bp, synthetic construct
  source 1..28: mol_type = other DNA
ctcctgcctctaccccctaagtagctgg

SEQ ID NO: 6587 - DNA, 28 bp, synthetic construct
  source 1..28: mol_type = other DNA
agaggcaggagaatcacttgaaccttgg

SEQ ID NO: 6588 - DNA, 28 bp, synthetic construct
  source 1..28: mol_type = other DNA
ggcaggagaatcacttgaaccttggagg

SEQ ID NO: 6589 - DNA, 28 bp, synthetic construct
  source 1..28: mol_type = other DNA
agaatcacttgaaccttggaggcagagg

SEQ ID NO: 6590 - DNA, 28 bp, synthetic construct
  source 1..28: mol_type = other DNA
cagttcactgcaacctctgcctccaagg

SEQ ID NO: 6591 - DNA, 28 bp, synthetic construct
  source 1..28: mol_type = other DNA
gagatcgcaccactgtactccagcctgg

SEQ ID NO: 6592 - DNA, 28 bp, synthetic construct
  source 1..28: mol_type = other DNA
agatcgcaccactgtactccagcctggg

SEQ ID NO: 6593 - DNA, 28 bp, synthetic construct
  source 1..28: mol_type = other DNA
ctctgttgcccaggctggagtacagtgg

SEQ ID NO: 6594 - DNA, 28 bp, synthetic construct
  source 1..28: mol_type = other DNA
cagggtctcactctgttgcccaggctgg

SEQ ID NO: 6595 - DNA, 28 bp, synthetic construct
  source 1..28: mol_type = other DNA
gagacagggtctcactctgttgcccagg

SEQ ID NO: 6596 - DNA, 28 bp, synthetic construct
  source 1..28: mol_type = other DNA
tttttttttttttttttttgagacaggg

SEQ ID NO: 6597 - DNA, 28 bp, synthetic construct
  source 1..28: mol_type = other DNA
ttttttttttttttttttttgagacagg

SEQ ID NO: 6598 - DNA, 28 bp, synthetic construct
  source 1..28: mol_type = other DNA
tctttggcttttccctcctacctgaagg

SEQ ID NO: 6599 - DNA, 28 bp, synthetic construct
  source 1..28: mol_type = other DNA
ctttttcttcttccttcaggtaggaggg

SEQ ID NO: 6600 - DNA, 28 bp, synthetic construct
  source 1..28: mol_type = other DNA
tctttttcttcttccttcaggtaggagg

SEQ ID NO: 6601 - DNA, 28 bp, synthetic construct
  source 1..28: mol_type = other DNA
ggatctttttcttcttccttcaggtagg

SEQ ID NO: 6602 - DNA, 28 bp, synthetic construct
  source 1..28: mol_type = other DNA
gacaggatctttttcttcttccttcagg

SEQ ID NO: 6603 - DNA, 28 bp, synthetic construct
  source 1..28: mol_type = other DNA
ggaagaagaaaaagatcctgtcctgagg

SEQ ID NO: 6604 - DNA, 28 bp, synthetic construct
  source 1..28: mol_type = other DNA
gaagaaaaagatcctgtcctgaggatgg

SEQ ID NO: 6605 - DNA, 28 bp, synthetic construct
  source 1..28: mol_type = other DNA
aaaaagatcctgtcctgaggatggccgg

SEQ ID NO: 6606 - DNA, 28 bp, synthetic construct
  source 1..28: mol_type = other DNA
tcctgtcctgaggatggccggctactgg

SEQ ID NO: 6607 - DNA, 28 bp, synthetic construct
  source 1..28: mol_type = other DNA
tccagtagccggccatcctcaggacagg

SEQ ID NO: 6608 - DNA, 28 bp, synthetic construct
  source 1..28: mol_type = other DNA
ctggctccagtagccggccatcctcagg

SEQ ID NO: 6609 - DNA, 28 bp, synthetic construct
  source 1..28: mol_type = other DNA
ctgaggatggccggctactggagccagg

SEQ ID NO: 6610 - DNA, 28 bp, synthetic construct
  source 1..28: mol_type = other DNA
aggatggccggctactggagccaggagg

SEQ ID NO: 6611 - DNA, 28 bp, synthetic construct
  source 1..28: mol_type = other DNA
ttcaaaacctcctggctccagtagccgg

SEQ ID NO: 6612 - DNA, 28 bp, synthetic construct
  source 1..28: mol_type = other DNA
gtctcattgaacattcaaaacctcctgg

SEQ ID NO: 6613 - DNA, 28 bp, synthetic construct
  source 1..28: mol_type = other DNA
aatgttcaatgagactatgccttgcagg

SEQ ID NO: 6614 - DNA, 28 bp, synthetic construct
  source 1..28: mol_type = other DNA
gttcaatgagactatgccttgcaggagg

SEQ ID NO: 6615 - DNA, 28 bp, synthetic construct
  source 1..28: mol_type = other DNA
caatgagactatgccttgcaggaggtgg

SEQ ID NO: 6616 - DNA, 28 bp, synthetic construct
  source 1..28: mol_type = other DNA
aatgagactatgccttgcaggaggtggg

SEQ ID NO: 6617 - DNA, 28 bp, synthetic construct
  source 1..28: mol_type = other DNA
atgagactatgccttgcaggaggtgggg

SEQ ID NO: 6618 - DNA, 28 bp, synthetic construct
  source 1..28: mol_type = other DNA
tgagactatgccttgcaggaggtggggg

SEQ ID NO: 6619 - DNA, 28 bp, synthetic construct
  source 1..28: mol_type = other DNA
gactatgccttgcaggaggtgggggagg

SEQ ID NO: 6620 - DNA, 28 bp, synthetic construct
  source 1..28: mol_type = other DNA
tatgccttgcaggaggtgggggaggtgg

SEQ ID NO: 6621 - DNA, 28 bp, synthetic construct
  source 1..28: mol_type = other DNA
atgccttgcaggaggtgggggaggtggg

SEQ ID NO: 6622 - DNA, 28 bp, synthetic construct
  source 1..28: mol_type = other DNA
tctcccacctcccccacctcctgcaagg

SEQ ID NO: 6623 - DNA, 28 bp, synthetic construct
  source 1..28: mol_type = other DNA
caggaggtgggggaggtgggagagatgg

SEQ ID NO: 6624 - DNA, 28 bp, synthetic construct
  source 1..28: mol_type = other DNA
gaggtgggggaggtgggagagatggagg

SEQ ID NO: 6625 - DNA, 28 bp, synthetic construct
  source 1..28: mol_type = other DNA
aggtgggggaggtgggagagatggaggg

SEQ ID NO: 6626 - DNA, 28 bp, synthetic construct
  source 1..28: mol_type = other DNA
tgggggaggtgggagagatggagggagg

SEQ ID NO: 6627 - DNA, 28 bp, synthetic construct
  source 1..28: mol_type = other DNA
gggggaggtgggagagatggagggaggg

SEQ ID NO: 6628 - DNA, 28 bp, synthetic construct
  source 1..28: mol_type = other DNA
agcatcttcacctgcatttaaagaaagg

SEQ ID NO: 6629 - DNA, 28 bp, synthetic construct
  source 1..28: mol_type = other DNA
ctgatatcgacctttctttaaatgcagg

SEQ ID NO: 6630 - DNA, 28 bp, synthetic construct
  source 1..28: mol_type = other DNA
aacttttttaaaggtttcaacctaatgg

SEQ ID NO: 6631 - DNA, 28 bp, synthetic construct
  source 1..28: mol_type = other DNA
ttttttaaaggtttcaacctaatggagg

SEQ ID NO: 6632 - DNA, 28 bp, synthetic construct
  source 1..28: mol_type = other DNA
tttttaaaggtttcaacctaatggaggg

SEQ ID NO: 6633 - DNA, 28 bp, synthetic construct
  source 1..28: mol_type = other DNA
attatgatcttctcatccctccattagg

SEQ ID NO: 6634 - DNA, 28 bp, synthetic construct
  source 1..28: mol_type = other DNA
ggagggatgagaagatcataatcagagg

SEQ ID NO: 6635 - DNA, 28 bp, synthetic construct
  source 1..28: mol_type = other DNA
gagggatgagaagatcataatcagaggg

SEQ ID NO: 6636 - DNA, 28 bp, synthetic construct
  source 1..28: mol_type = other DNA
tcctgttgagtgaagaaccatgctttgg

SEQ ID NO: 6637 - DNA, 28 bp, synthetic construct
  source 1..28: mol_type = other DNA
tccaaagcatggttcttcactcaacagg

SEQ ID NO: 6638 - DNA, 28 bp, synthetic construct
  source 1..28: mol_type = other DNA
aaccatgctttggattgtcccgagttgg

SEQ ID NO: 6639 - DNA, 28 bp, synthetic construct
  source 1..28: mol_type = other DNA
ctccaactcgggacaatccaaagcatgg

SEQ ID NO: 6640 - DNA, 28 bp, synthetic construct
  source 1..28: mol_type = other DNA
catgctttggattgtcccgagttggagg

SEQ ID NO: 6641 - DNA, 28 bp, synthetic construct
  source 1..28: mol_type = other DNA
tttggattgtcccgagttggaggcctgg

SEQ ID NO: 6642 - DNA, 28 bp, synthetic construct
  source 1..28: mol_type = other DNA
gattgtcccgagttggaggcctggcagg

SEQ ID NO: 6643 - DNA, 28 bp, synthetic construct
  source 1..28: mol_type = other DNA
tgtcccgagttggaggcctggcaggtgg

SEQ ID NO: 6644 - DNA, 28 bp, synthetic construct
  source 1..28: mol_type = other DNA
ttaccacctgccaggcctccaactcggg

SEQ ID NO: 6645 - DNA, 28 bp, synthetic construct
  source 1..28: mol_type = other DNA
attaccacctgccaggcctccaactcgg

SEQ ID NO: 6646 - DNA, 28 bp, synthetic construct
  source 1..28: mol_type = other DNA
gagttggaggcctggcaggtggtaatgg

SEQ ID NO: 6647 - DNA, 28 bp, synthetic construct
  source 1..28: mol_type = other DNA
ggaggcctggcaggtggtaatggcacgg

SEQ ID NO: 6648 - DNA, 28 bp, synthetic construct
  source 1..28: mol_type = other DNA
gaggcctggcaggtggtaatggcacggg

SEQ ID NO: 6649 - DNA, 28 bp, synthetic construct
  source 1..28: mol_type = other DNA
tgatcccgtgccattaccacctgccagg

SEQ ID NO: 6650 - DNA, 28 bp, synthetic construct
  source 1..28: mol_type = other DNA
gcaggtggtaatggcacgggatcagagg

SEQ ID NO: 6651 - DNA, 28 bp, synthetic construct
  source 1..28: mol_type = other DNA
aggctgaatcaaaaacatctcctagagg

SEQ ID NO: 6652 - DNA, 28 bp, synthetic construct
  source 1..28: mol_type = other DNA
acattaaggttttgtgttatcctctagg

SEQ ID NO: 6653 - DNA, 28 bp, synthetic construct
  source 1..28: mol_type = other DNA
taccctttaaatatatgcttaagtcagg

SEQ ID NO: 6654 - DNA, 28 bp, synthetic construct
  source 1..28: mol_type = other DNA
accctttaaatatatgcttaagtcaggg

SEQ ID NO: 6655 - DNA, 28 bp, synthetic construct
  source 1..28: mol_type = other DNA
tccctgacttaagcatatatttaaaggg

SEQ ID NO: 6656 - DNA, 28 bp, synthetic construct
  source 1..28: mol_type = other DNA
atccctgacttaagcatatatttaaagg

SEQ ID NO: 6657 - DNA, 28 bp, synthetic construct
  source 1..28: mol_type = other DNA
ggatgtttgatttcttctctgaagatgg

SEQ ID NO: 6658 - DNA, 28 bp, synthetic construct
  source 1..28: mol_type = other DNA
gtcactgtatgctgaatggaacacatgg

SEQ ID NO: 6659 - DNA, 28 bp, synthetic construct
  source 1..28: mol_type = other DNA
gtgataatggtcactgtatgctgaatgg

SEQ ID NO: 6660 - DNA, 28 bp, synthetic construct
  source 1..28: mol_type = other DNA
cagtgaccattatcacaagacctaaagg

SEQ ID NO: 6661 - DNA, 28 bp, synthetic construct
  source 1..28: mol_type = other DNA
aactgtcctttaggtcttgtgataatgg

SEQ ID NO: 6662 - DNA, 28 bp, synthetic construct
  source 1..28: mol_type = other DNA
ataattttactctgaactgtcctttagg

SEQ ID NO: 6663 - DNA, 28 bp, synthetic construct
  source 1..28: mol_type = other DNA
aaatctgcccatactcttaccgaacagg

SEQ ID NO: 6664 - DNA, 28 bp, synthetic construct
  source 1..28: mol_type = other DNA
tctgcccatactcttaccgaacaggagg

SEQ ID NO: 6665 - DNA, 28 bp, synthetic construct
  source 1..28: mol_type = other DNA
aaaacctcctgttcggtaagagtatggg

SEQ ID NO: 6666 - DNA, 28 bp, synthetic construct
  source 1..28: mol_type = other DNA
taaaacctcctgttcggtaagagtatgg

SEQ ID NO: 6667 - DNA, 28 bp, synthetic construct
  source 1..28: mol_type = other DNA
ttgtcataatgtaaaacctcctgttcgg

SEQ ID NO: 6668 - DNA, 28 bp, synthetic construct
  source 1..28: mol_type = other DNA
gaggttttacattatgacaatgagatgg

SEQ ID NO: 6669 - DNA, 28 bp, synthetic construct
  source 1..28: mol_type = other DNA
atgacaatgagatggttgtgaattcagg

SEQ ID NO: 6670 - DNA, 28 bp, synthetic construct
  source 1..28: mol_type = other DNA
tgacaatgagatggttgtgaattcaggg

SEQ ID NO: 6671 - DNA, 28 bp, synthetic construct
  source 1..28: mol_type = other DNA
gagatggttgtgaattcagggaaacagg

SEQ ID NO: 6672 - DNA, 28 bp, synthetic construct
  source 1..28: mol_type = other DNA
agatggttgtgaattcagggaaacaggg

SEQ ID NO: 6673 - DNA, 28 bp, synthetic construct
  source 1..28: mol_type = other DNA
tggttgtgaattcagggaaacagggtgg

SEQ ID NO: 6674 - DNA, 28 bp, synthetic construct
  source 1..28: mol_type = other DNA
ggttgtgaattcagggaaacagggtggg

SEQ ID NO: 6675 - DNA, 28 bp, synthetic construct
  source 1..28: mol_type = other DNA
aattcagggaaacagggtgggatgaagg

SEQ ID NO: 6676 - DNA, 28 bp, synthetic construct
  source 1..28: mol_type = other DNA
tgtattcatcatcatcttcctctactgg

SEQ ID NO: 6677 - DNA, 28 bp, synthetic construct
  source 1..28: mol_type = other DNA
gtattcatcatcatcttcctctactggg

SEQ ID NO: 6678 - DNA, 28 bp, synthetic construct
  source 1..28: mol_type = other DNA
tcagagaaaacaagagacccagtagagg

SEQ ID NO: 6679 - DNA, 28 bp, synthetic construct
  source 1..28: mol_type = other DNA
ttttctctgaaagagaatttgctaacgg

SEQ ID NO: 6680 - DNA, 28 bp, synthetic construct
  source 1..28: mol_type = other DNA
ttgctaacggaccagtacacctaccagg

SEQ ID NO: 6681 - DNA, 28 bp, synthetic construct
  source 1..28: mol_type = other DNA
tgctaacggaccagtacacctaccaggg

SEQ ID NO: 6682 - DNA, 28 bp, synthetic construct
  source 1..28: mol_type = other DNA
gctaacggaccagtacacctaccagggg

SEQ ID NO: 6683 - DNA, 28 bp, synthetic construct
  source 1..28: mol_type = other DNA
attttttttcccctggtaggtgtactgg

SEQ ID NO: 6684 - DNA, 28 bp, synthetic construct
  source 1..28: mol_type = other DNA
tagattggattttttttcccctggtagg

SEQ ID NO: 6685 - DNA, 28 bp, synthetic construct
  source 1..28: mol_type = other DNA
agcataaagtgagttttgttgaatttgg

SEQ ID NO: 6686 - DNA, 28 bp, synthetic construct
  source 1..28: mol_type = other DNA
aattcaacaaaactcactttatgctagg

SEQ ID NO: 6687 - DNA, 28 bp, synthetic construct
  source 1..28: mol_type = other DNA
attcaacaaaactcactttatgctaggg

SEQ ID NO: 6688 - DNA, 28 bp, synthetic construct
  source 1..28: mol_type = other DNA
caacaaaactcactttatgctagggagg

SEQ ID NO: 6689 - DNA, 28 bp, synthetic construct
  source 1..28: mol_type = other DNA
caaaactcactttatgctagggaggagg

SEQ ID NO: 6690 - DNA, 28 bp, synthetic construct
  source 1..28: mol_type = other DNA
aaaactcactttatgctagggaggaggg

SEQ ID NO: 6691 - DNA, 28 bp, synthetic construct
  source 1..28: mol_type = other DNA
actcactttatgctagggaggagggtgg

SEQ ID NO: 6692 - DNA, 28 bp, synthetic construct
  source 1..28: mol_type = other DNA
ttatgctagggaggagggtggtaactgg

SEQ ID NO: 6693 - DNA, 28 bp, synthetic construct
  source 1..28: mol_type = other DNA
tgctagggaggagggtggtaactggagg

SEQ ID NO: 6694 - DNA, 28 bp, synthetic construct
  source 1..28: mol_type = other DNA
tagggaggagggtggtaactggaggagg

SEQ ID NO: 6695 - DNA, 28 bp, synthetic construct
  source 1..28: mol_type = other DNA
ggaggagggtggtaactggaggaggagg

SEQ ID NO: 6696 - DNA, 28 bp, synthetic construct
  source 1..28: mol_type = other DNA
aggaacatcatattcttcacttccaagg

SEQ ID NO: 6697 - DNA, 28 bp, synthetic construct
  source 1..28: mol_type = other DNA
tattcttcacttccaaggtgaccattgg

SEQ ID NO: 6698 - DNA, 28 bp, synthetic construct
  source 1..28: mol_type = other DNA
ttcaggtcttttccaatggtcaccttgg

SEQ ID NO: 6699 - DNA, 28 bp, synthetic construct
  source 1..28: mol_type = other DNA
tgatttactttcaggtcttttccaatgg

SEQ ID NO: 6700 - DNA, 28 bp, synthetic construct
  source 1..28: mol_type = other DNA
gaaactaacaatttgatttactttcagg

SEQ ID NO: 6701 - DNA, 28 bp, synthetic construct
  source 1..28: mol_type = other DNA
tatttcttaccttagctccttctaaagg

SEQ ID NO: 6702 - DNA, 28 bp, synthetic construct
  source 1..28: mol_type = other DNA
catgatttgcctttagaaggagctaagg

SEQ ID NO: 6703 - DNA, 28 bp, synthetic construct
  source 1..28: mol_type = other DNA
cttagctccttctaaaggcaaatcatgg

SEQ ID NO: 6704 - DNA, 28 bp, synthetic construct
  source 1..28: mol_type = other DNA
acagacgccatgatttgcctttagaagg

SEQ ID NO: 6705 - DNA, 28 bp, synthetic construct
  source 1..28: mol_type = other DNA
ggcgtctgtgtttccgcataagcactgg

SEQ ID NO: 6706 - DNA, 28 bp, synthetic construct
  source 1..28: mol_type = other DNA
gcgtctgtgtttccgcataagcactggg

SEQ ID NO: 6707 - DNA, 28 bp, synthetic construct
  source 1..28: mol_type = other DNA
agtgggctctgacccagtgcttatgcgg

SEQ ID NO: 6708 - DNA, 28 bp, synthetic construct
  source 1..28: mol_type = other DNA
atgtcaatggaaggcacagtagagtggg

SEQ ID NO: 6709 - DNA, 28 bp, synthetic construct
  source 1..28: mol_type = other DNA
aatgtcaatggaaggcacagtagagtgg

SEQ ID NO: 6710 - DNA, 28 bp, synthetic construct
  source 1..28: mol_type = other DNA
cacagcgagttcaaatgtcaatggaagg

SEQ ID NO: 6711 - DNA, 28 bp, synthetic construct
  source 1..28: mol_type = other DNA
gaatcacagcgagttcaaatgtcaatgg

SEQ ID NO: 6712 - DNA, 28 bp, synthetic construct
  source 1..28: mol_type = other DNA
tgacatttgaactcgctgtgattccagg

SEQ ID NO: 6713 - DNA, 28 bp, synthetic construct
  source 1..28: mol_type = other DNA
ttgaactcgctgtgattccaggttttgg

SEQ ID NO: 6714 - DNA, 28 bp, synthetic construct
  source 1..28: mol_type = other DNA
tccaggttttggagagccctcccctagg

SEQ ID NO: 6715 - DNA, 28 bp, synthetic construct
  source 1..28: mol_type = other DNA
tcctaggggagggctctccaaaacctgg

SEQ ID NO: 6716 - DNA, 28 bp, synthetic construct
  source 1..28: mol_type = other DNA
ttgtgggatgtcgactcctaggggaggg

SEQ ID NO: 6717 - DNA, 28 bp, synthetic construct
  source 1..28: mol_type = other DNA
cttgtgggatgtcgactcctaggggagg

SEQ ID NO: 6718 - DNA, 28 bp, synthetic construct
  source 1..28: mol_type = other DNA
cagcttgtgggatgtcgactcctagggg

SEQ ID NO: 6719 - DNA, 28 bp, synthetic construct
  source 1..28: mol_type = other DNA
tcagcttgtgggatgtcgactcctaggg

SEQ ID NO: 6720 - DNA, 28 bp, synthetic construct
  source 1..28: mol_type = other DNA
atcagcttgtgggatgtcgactcctagg

SEQ ID NO: 6721 - DNA, 28 bp, synthetic construct
  source 1..28: mol_type = other DNA
atgtgtttgggactaatcagcttgtggg

SEQ ID NO: 6722 - DNA, 28 bp, synthetic construct
  source 1..28: mol_type = other DNA
gatgtgtttgggactaatcagcttgtgg

SEQ ID NO: 6723 - DNA, 28 bp, synthetic construct
  source 1..28: mol_type = other DNA
gctgattagtcccaaacacatcccgagg

SEQ ID NO: 6724 - DNA, 28 bp, synthetic construct
  source 1..28: mol_type = other DNA
ctgattagtcccaaacacatcccgaggg

SEQ ID NO: 6725 - DNA, 28 bp, synthetic construct
  source 1..28: mol_type = other DNA
agcatggtgccctcgggatgtgtttggg

SEQ ID NO: 6726 - DNA, 28 bp, synthetic construct
  source 1..28: mol_type = other DNA
aagcatggtgccctcgggatgtgtttgg

SEQ ID NO: 6727 - DNA, 28 bp, synthetic construct
  source 1..28: mol_type = other DNA
catcccgagggcaccatgcttcaagagg

SEQ ID NO: 6728 - DNA, 28 bp, synthetic construct
  source 1..28: mol_type = other DNA
atgcctcttgaagcatggtgccctcggg

SEQ ID NO: 6729 - DNA, 28 bp, synthetic construct
  source 1..28: mol_type = other DNA
aatgcctcttgaagcatggtgccctcgg

SEQ ID NO: 6730 - DNA, 28 bp, synthetic construct
  source 1..28: mol_type = other DNA
gagggcaccatgcttcaagaggcattgg

SEQ ID NO: 6731 - DNA, 28 bp, synthetic construct
  source 1..28: mol_type = other DNA
ggcaccatgcttcaagaggcattggcgg

SEQ ID NO: 6732 - DNA, 28 bp, synthetic construct
  source 1..28: mol_type = other DNA
gcaccatgcttcaagaggcattggcggg

SEQ ID NO: 6733 - DNA, 28 bp, synthetic construct
  source 1..28: mol_type = other DNA
agacccgccaatgcctcttgaagcatgg

SEQ ID NO: 6734 - DNA, 28 bp, synthetic construct
  source 1..28: mol_type = other DNA
gcttcaagaggcattggcgggtctctgg

SEQ ID NO: 6735 - DNA, 28 bp, synthetic construct
  source 1..28: mol_type = other DNA
caagaggcattggcgggtctctggaagg

SEQ ID NO: 6736 - DNA, 28 bp, synthetic construct
  source 1..28: mol_type = other DNA
tctggaaggcacgctttccacatgatgg

SEQ ID NO: 6737 - DNA, 28 bp, synthetic construct
  source 1..28: mol_type = other DNA
agactgagtagacacatccatcatgtgg

SEQ ID NO: 6738 - DNA, 28 bp, synthetic construct
  source 1..28: mol_type = other DNA
ggatgtgtctactcagtctattgtctgg

SEQ ID NO: 6739 - DNA, 28 bp, synthetic construct
  source 1..28: mol_type = other DNA
tgtgtctactcagtctattgtctggtgg

SEQ ID NO: 6740 - DNA, 28 bp, synthetic construct
  source 1..28: mol_type = other DNA
gtgtctactcagtctattgtctggtggg

SEQ ID NO: 6741 - DNA, 28 bp, synthetic construct
  source 1..28: mol_type = other DNA
tactcagtctattgtctggtgggattgg

SEQ ID NO: 6742 - DNA, 28 bp, synthetic construct
  source 1..28: mol_type = other DNA
tcagtctattgtctggtgggattggtgg

SEQ ID NO: 6743 - DNA, 28 bp, synthetic construct
  source 1..28: mol_type = other DNA
gtctattgtctggtgggattggtggagg

SEQ ID NO: 6744 - DNA, 28 bp, synthetic construct
  source 1..28: mol_type = other DNA
ctggtgggattggtggaggtctttcagg

SEQ ID NO: 6745 - DNA, 28 bp, synthetic construct
  source 1..28: mol_type = other DNA
gtgggattggtggaggtctttcaggtgg

SEQ ID NO: 6746 - DNA, 28 bp, synthetic construct
  source 1..28: mol_type = other DNA
ggattggtggaggtctttcaggtggcgg

SEQ ID NO: 6747 - DNA, 28 bp, synthetic construct
  source 1..28: mol_type = other DNA
ttggtggaggtctttcaggtggcggtgg

SEQ ID NO: 6748 - DNA, 28 bp, synthetic construct
  source 1..28: mol_type = other DNA
gtggaggtctttcaggtggcggtggagg

SEQ ID NO: 6749 - DNA, 28 bp, synthetic construct
  source 1..28: mol_type = other DNA
gaggtctttcaggtggcggtggaggagg

SEQ ID NO: 6750 - DNA, 28 bp, synthetic construct
  source 1..28: mol_type = other DNA
ggtggcggtggaggaggatctcttaagg

SEQ ID NO: 6751 - DNA, 28 bp, synthetic construct
  source 1..28: mol_type = other DNA
gtggcggtggaggaggatctcttaaggg

SEQ ID NO: 6752 - DNA, 28 bp, synthetic construct
  source 1..28: mol_type = other DNA
gcggtggaggaggatctcttaagggagg

SEQ ID NO: 6753 - DNA, 28 bp, synthetic construct
  source 1..28: mol_type = other DNA
gtggaggaggatctcttaagggaggagg

SEQ ID NO: 6754 - DNA, 28 bp, synthetic construct
  source 1..28: mol_type = other DNA
gaggaggatctcttaagggaggaggtgg

SEQ ID NO: 6755 - DNA, 28 bp, synthetic construct
  source 1..28: mol_type = other DNA
gatctcttaagggaggaggtggtgctgg

SEQ ID NO: 6756 - DNA, 28 bp, synthetic construct
  source 1..28: mol_type = other DNA
atctcttaagggaggaggtggtgctggg

SEQ ID NO: 6757 - DNA, 28 bp, synthetic construct
  source 1..28: mol_type = other DNA
ttaagggaggaggtggtgctgggagtgg

SEQ ID NO: 6758 - DNA, 28 bp, synthetic construct
  source 1..28: mol_type = other DNA
gtttatcttgttttctcaccatgcaagg

SEQ ID NO: 6759 - DNA, 28 bp, synthetic construct
  source 1..28: mol_type = other DNA
ctgtttctttagtcttctccttgcatgg

SEQ ID NO: 6760 - DNA, 28 bp, synthetic construct
  source 1..28: mol_type = other DNA
gtttctaataaaattgatctacctttgg

SEQ ID NO: 6761 - DNA, 28 bp, synthetic construct
  source 1..28: mol_type = other DNA
attgatctacctttggtgaacccgttgg

SEQ ID NO: 6762 - DNA, 28 bp, synthetic construct
  source 1..28: mol_type = other DNA
ttgatctacctttggtgaacccgttggg

SEQ ID NO: 6763 - DNA, 28 bp, synthetic construct
  source 1..28: mol_type = other DNA
tgtggcagcccaacgggttcaccaaagg

SEQ ID NO: 6764 - DNA, 28 bp, synthetic construct
  source 1..28: mol_type = other DNA
tttggtgaacccgttgggctgccacagg

SEQ ID NO: 6765 - DNA, 28 bp, synthetic construct
  source 1..28: mol_type = other DNA
ttggtgaacccgttgggctgccacaggg

SEQ ID NO: 6766 - DNA, 28 bp, synthetic construct
  source 1..28: mol_type = other DNA
ttagatctccctgtggcagcccaacggg

SEQ ID NO: 6767 - DNA, 28 bp, synthetic construct
  source 1..28: mol_type = other DNA
gttagatctccctgtggcagcccaacgg

SEQ ID NO: 6768 - DNA, 28 bp, synthetic construct
  source 1..28: mol_type = other DNA
agaaaggcatagttagatctccctgtgg

SEQ ID NO: 6769 - DNA, 28 bp, synthetic construct
  source 1..28: mol_type = other DNA
aactatgcctttctgaattagatccagg

SEQ ID NO: 6770 - DNA, 28 bp, synthetic construct
  source 1..28: mol_type = other DNA
tgcctttctgaattagatccaggcgagg

SEQ ID NO: 6771 - DNA, 28 bp, synthetic construct
  source 1..28: mol_type = other DNA
ctcctcgcctggatctaattcagaaagg

SEQ ID NO: 6772 - DNA, 28 bp, synthetic construct
  source 1..28: mol_type = other DNA
ctttctgaattagatccaggcgaggagg

SEQ ID NO: 6773 - DNA, 28 bp, synthetic construct
  source 1..28: mol_type = other DNA
tgaattagatccaggcgaggaggcacgg

SEQ ID NO: 6774 - DNA, 28 bp, synthetic construct
  source 1..28: mol_type = other DNA
gaattagatccaggcgaggaggcacggg

SEQ ID NO: 6775 - DNA, 28 bp, synthetic construct
  source 1..28: mol_type = other DNA
ttagatccaggcgaggaggcacgggtgg

SEQ ID NO: 6776 - DNA, 28 bp, synthetic construct
  source 1..28: mol_type = other DNA
atccaggcgaggaggcacgggtggcagg

SEQ ID NO: 6777 - DNA, 28 bp, synthetic construct
  source 1..28: mol_type = other DNA
agcctgccacccgtgcctcctcgcctgg

SEQ ID NO: 6778 - DNA, 28 bp, synthetic construct
  source 1..28: mol_type = other DNA
gaggcacgggtggcaggcttagatgtgg

SEQ ID NO: 6779 - DNA, 28 bp, synthetic construct
  source 1..28: mol_type = other DNA
aggcacgggtggcaggcttagatgtggg

SEQ ID NO: 6780 - DNA, 28 bp, synthetic construct
  source 1..28: mol_type = other DNA
gggtggcaggcttagatgtgggatctgg

SEQ ID NO: 6781 - DNA, 28 bp, synthetic construct
  source 1..28: mol_type = other DNA
gcaggcttagatgtgggatctggagtgg

SEQ ID NO: 6782 - DNA, 28 bp, synthetic construct
  source 1..28: mol_type = other DNA
caggcttagatgtgggatctggagtggg

SEQ ID NO: 6783 - DNA, 28 bp, synthetic construct
  source 1..28: mol_type = other DNA
ttagatgtgggatctggagtgggtcagg

SEQ ID NO: 6784 - DNA, 28 bp, synthetic construct
  source 1..28: mol_type = other DNA
gtgggatctggagtgggtcaggctgtgg

SEQ ID NO: 6785 - DNA, 28 bp, synthetic construct
  source 1..28: mol_type = other DNA
tgggtcaggctgtggctttcttctctgg

SEQ ID NO: 6786 - DNA, 28 bp, synthetic construct
  source 1..28: mol_type = other DNA
gggtcaggctgtggctttcttctctggg

SEQ ID NO: 6787 - DNA, 28 bp, synthetic construct
  source 1..28: mol_type = other DNA
aggctgtggctttcttctctgggcaagg

SEQ ID NO: 6788 - DNA, 28 bp, synthetic construct
  source 1..28: mol_type = other DNA
ggctgtggctttcttctctgggcaaggg

SEQ ID NO: 6789 - DNA, 28 bp, synthetic construct
  source 1..28: mol_type = other DNA
gctgtggctttcttctctgggcaagggg

SEQ ID NO: 6790 - DNA, 28 bp, synthetic construct
  source 1..28: mol_type = other DNA
ggctttcttctctgggcaaggggagagg

SEQ ID NO: 6791 - DNA, 28 bp, synthetic construct
  source 1..28: mol_type = other DNA
ttctctgggcaaggggagaggatcctgg

SEQ ID NO: 6792 - DNA, 28 bp, synthetic construct
  source 1..28: mol_type = other DNA
ggggagaggatcctggtgatgtgactgg

SEQ ID NO: 6793 - DNA, 28 bp, synthetic construct
  source 1..28: mol_type = other DNA
ggcagaactcaccagtcacatcaccagg

SEQ ID NO: 6794 - DNA, 28 bp, synthetic construct
  source 1..28: mol_type = other DNA
tctttttctgttctagtgcactgacagg

SEQ ID NO: 6795 - DNA, 28 bp, synthetic construct
  source 1..28: mol_type = other DNA
ggctgtgatcttaccagtcacatcctgg

SEQ ID NO: 6796 - DNA, 28 bp, synthetic construct
  source 1..28: mol_type = other DNA
ccagtcacatcctggactttgtctgagg

SEQ ID NO: 6797 - DNA, 28 bp, synthetic construct
  source 1..28: mol_type = other DNA
cagtcacatcctggactttgtctgaggg

SEQ ID NO: 6798 - DNA, 28 bp, synthetic construct
  source 1..28: mol_type = other DNA
tgatgtgagccctcagacaaagtccagg

SEQ ID NO: 6799 - DNA, 28 bp, synthetic construct
  source 1..28: mol_type = other DNA
ggctcacatcagatctaattatcccagg

SEQ ID NO: 6800 - DNA, 28 bp, synthetic construct
  source 1..28: mol_type = other DNA
tgagttttcaagctgtcagaatcctggg

SEQ ID NO: 6801 - DNA, 28 bp, synthetic construct
  source 1..28: mol_type = other DNA
ctgagttttcaagctgtcagaatcctgg

SEQ ID NO: 6802 - DNA, 28 bp, synthetic construct
  source 1..28: mol_type = other DNA
caggattctgacagcttgaaaactcagg

SEQ ID NO: 6803 - DNA, 28 bp, synthetic construct
  source 1..28: mol_type = other DNA
gaaaactcaggcaacgatacagacttgg

SEQ ID NO: 6804 - DNA, 28 bp, synthetic construct
  source 1..28: mol_type = other DNA
aaaactcaggcaacgatacagacttggg

SEQ ID NO: 6805 - DNA, 28 bp, synthetic construct
  source 1..28: mol_type = other DNA
aacccatgtttctagttttacctttcgg

SEQ ID NO: 6806 - DNA, 28 bp, synthetic construct
  source 1..28: mol_type = other DNA
gtccgaaaggtaaaactagaaacatggg

SEQ ID NO: 6807 - DNA, 28 bp, synthetic construct
  source 1..28: mol_type = other DNA
cgtccgaaaggtaaaactagaaacatgg

SEQ ID NO: 6808 - DNA, 28 bp, synthetic construct
  source 1..28: mol_type = other DNA
atgaatcggttggcaaacgtccgaaagg

SEQ ID NO: 6809 - DNA, 28 bp, synthetic construct
  source 1..28: mol_type = other DNA
acgtttgccaaccgattcatcatcaagg

SEQ ID NO: 6810 - DNA, 28 bp, synthetic construct
  source 1..28: mol_type = other DNA
gaggagtccttgatgatgaatcggttgg

SEQ ID NO: 6811 - DNA, 28 bp, synthetic construct
  source 1..28: mol_type = other DNA
tcgtgaggagtccttgatgatgaatcgg

SEQ ID NO: 6812 - DNA, 28 bp, synthetic construct
  source 1..28: mol_type = other DNA
ggtgttgcagcatcattgacccctttgg

SEQ ID NO: 6813 - DNA, 28 bp, synthetic construct
  source 1..28: mol_type = other DNA
aaggggtcaatgatgctgcaacacctgg

SEQ ID NO: 6814 - DNA, 28 bp, synthetic construct
  source 1..28: mol_type = other DNA
cttggatcaaaggggtccacgattatgg

SEQ ID NO: 6815 - DNA, 28 bp, synthetic construct
  source 1..28: mol_type = other DNA
ttggatcaaaggggtccacgattatggg

SEQ ID NO: 6816 - DNA, 28 bp, synthetic construct
  source 1..28: mol_type = other DNA
ataaaaggaactgagcccataatcgtgg

SEQ ID NO: 6817 - DNA, 28 bp, synthetic construct
  source 1..28: mol_type = other DNA
ttccttttatttcacaacgacagaaagg

SEQ ID NO: 6818 - DNA, 28 bp, synthetic construct
  source 1..28: mol_type = other DNA
tccttttatttcacaacgacagaaaggg

SEQ ID NO: 6819 - DNA, 28 bp, synthetic construct
  source 1..28: mol_type = other DNA
gccctttctgtcgttgtgaaataaaagg

SEQ ID NO: 6820 - DNA, 28 bp, synthetic construct
  source 1..28: mol_type = other DNA
tatttgtttaggagtcggatggtcaggg

SEQ ID NO: 6821 - DNA, 28 bp, synthetic construct
  source 1..28: mol_type = other DNA
ctatttgtttaggagtcggatggtcagg

SEQ ID NO: 6822 - DNA, 28 bp, synthetic construct
  source 1..28: mol_type = other DNA
attttctatttgtttaggagtcggatgg

SEQ ID NO: 6823 - DNA, 28 bp, synthetic construct
  source 1..28: mol_type = other DNA
atgcattttctatttgtttaggagtcgg

SEQ ID NO: 6824 - DNA, 28 bp, synthetic construct
  source 1..28: mol_type = other DNA
gactcctaaacaaatagaaaatgcatgg

SEQ ID NO: 6825 - DNA, 28 bp, synthetic construct
  source 1..28: mol_type = other DNA
caatccatgcattttctatttgtttagg

SEQ ID NO: 6826 - DNA, 28 bp, synthetic construct
  source 1..28: mol_type = other DNA
ccttgctatatttcatgtagctatgagg

SEQ ID NO: 6827 - DNA, 28 bp, synthetic construct
  source 1..28: mol_type = other DNA
attgctatgtttaaaaaaagatttgtgg

SEQ ID NO: 6828 - DNA, 28 bp, synthetic construct
  source 1..28: mol_type = other DNA
tttttttaaacatagcaattataactgg

SEQ ID NO: 6829 - DNA, 28 bp, synthetic construct
  source 1..28: mol_type = other DNA
atatgtatataaatgcactgagaatagg

SEQ ID NO: 6830 - DNA, 28 bp, synthetic construct
  source 1..28: mol_type = other DNA
gtatataaatgcactgagaataggttgg

SEQ ID NO: 6831 - DNA, 28 bp, synthetic construct
  source 1..28: mol_type = other DNA
tactgtgctttgaaaattcttggtatgg

SEQ ID NO: 6832 - DNA, 28 bp, synthetic construct
  source 1..28: mol_type = other DNA
ggagatactgtgctttgaaaattcttgg

SEQ ID NO: 6833 - DNA, 28 bp, synthetic construct
  source 1..28: mol_type = other DNA
tctcccacagaaactcaataacttctgg

SEQ ID NO: 6834 - DNA, 28 bp, synthetic construct
  source 1..28: mol_type = other DNA
cagccagaagttattgagtttctgtggg

SEQ ID NO: 6835 - DNA, 28 bp, synthetic construct
  source 1..28: mol_type = other DNA
tcagccagaagttattgagtttctgtgg

SEQ ID NO: 6836 - DNA, 28 bp, synthetic construct
  source 1..28: mol_type = other DNA
ggctgaaagaacgaatgaaagaataagg

SEQ ID NO: 6837 - DNA, 28 bp, synthetic construct
  source 1..28: mol_type = other DNA
atggcaggtataatcattagcaacatgg

SEQ ID NO: 6838 - DNA, 28 bp, synthetic construct
  source 1..28: mol_type = other DNA
taatgattatacctgccatgccgtaagg

SEQ ID NO: 6839 - DNA, 28 bp, synthetic construct
  source 1..28: mol_type = other DNA
tatacctgccatgccgtaaggcaagagg

SEQ ID NO: 6840 - DNA, 28 bp, synthetic construct
  source 1..28: mol_type = other DNA
tgcacctcttgccttacggcatggcagg

SEQ ID NO: 6841 - DNA, 28 bp, synthetic construct
  source 1..28: mol_type = other DNA
gatgtgcacctcttgccttacggcatgg

SEQ ID NO: 6842 - DNA, 28 bp, synthetic construct
  source 1..28: mol_type = other DNA
catttgatgtgcacctcttgccttacgg

SEQ ID NO: 6843 - DNA, 28 bp, synthetic construct
  source 1..28: mol_type = other DNA
aagaggtgcacatcaaatgcccacaagg

SEQ ID NO: 6844 - DNA, 28 bp, synthetic construct
  source 1..28: mol_type = other DNA
caaagatgtcaagattgagccttgtggg

SEQ ID NO: 6845 - DNA, 28 bp, synthetic construct
  source 1..28: mol_type = other DNA
acaaagatgtcaagattgagccttgtgg

SEQ ID NO: 6846 - DNA, 28 bp, synthetic construct
  source 1..28: mol_type = other DNA
gcacaaatcttacagagctgaaaagtgg

SEQ ID NO: 6847 - DNA, 28 bp, synthetic construct
  source 1..28: mol_type = other DNA
aacaatatgaattatattgtgaaatggg

SEQ ID NO: 6848 - DNA, 28 bp, synthetic construct
  source 1..28: mol_type = other DNA
gaacaatatgaattatattgtgaaatgg

SEQ ID NO: 6849 - DNA, 28 bp, synthetic construct
  source 1..28: mol_type = other DNA
ttcacaatataattcatattgttcctgg

SEQ ID NO: 6850 - DNA, 28 bp, synthetic construct
  source 1..28: mol_type = other DNA
tataattcatattgttcctggaatttgg

SEQ ID NO: 6851 - DNA, 28 bp, synthetic construct
  source 1..28: mol_type = other DNA
ataattcatattgttcctggaatttggg

SEQ ID NO: 6852 - DNA, 28 bp, synthetic construct
  source 1..28: mol_type = other DNA
taattcatattgttcctggaatttgggg

SEQ ID NO: 6853 - DNA, 28 bp, synthetic construct
  source 1..28: mol_type = other DNA
ttcatattgttcctggaatttggggagg

SEQ ID NO: 6854 - DNA, 28 bp, synthetic construct
  source 1..28: mol_type = other DNA
atattgttcctggaatttggggaggagg

SEQ ID NO: 6855 - DNA, 28 bp, synthetic construct
  source 1..28: mol_type = other DNA
tattgttcctggaatttggggaggaggg

SEQ ID NO: 6856 - DNA, 28 bp, synthetic construct
  source 1..28: mol_type = other DNA
actttctccctcctccccaaattccagg

SEQ ID NO: 6857 - DNA, 28 bp, synthetic construct
  source 1..28: mol_type = other DNA
tatccttacctgtgtaacttttatatgg

SEQ ID NO: 6858 - DNA, 28 bp, synthetic construct
  source 1..28: mol_type = other DNA
tgaccatataaaagttacacaggtaagg

SEQ ID NO: 6859 - DNA, 28 bp, synthetic construct
  source 1..28: mol_type = other DNA
cctgtgtaacttttatatggtcatgagg

SEQ ID NO: 6860 - DNA, 28 bp, synthetic construct
  source 1..28: mol_type = other DNA
taacttttatatggtcatgaggtgtagg

SEQ ID NO: 6861 - DNA, 28 bp, synthetic construct
  source 1..28: mol_type = other DNA
taggttcacataatccagttaaatcagg

SEQ ID NO: 6862 - DNA, 28 bp, synthetic construct
  source 1..28: mol_type = other DNA
ggaggagttataatcctgatttaactgg

SEQ ID NO: 6863 - DNA, 28 bp, synthetic construct
  source 1..28: mol_type = other DNA
aatcaggattataactcctcccatcagg

SEQ ID NO: 6864 - DNA, 28 bp, synthetic construct
  source 1..28: mol_type = other DNA
attcagttatctttatcctgatgggagg

SEQ ID NO: 6865 - DNA, 28 bp, synthetic construct
  source 1..28: mol_type = other DNA
taaattcagttatctttatcctgatggg

SEQ ID NO: 6866 - DNA, 28 bp, synthetic construct
  source 1..28: mol_type = other DNA
ttaaattcagttatctttatcctgatgg

SEQ ID NO: 6867 - DNA, 28 bp, synthetic construct
  source 1..28: mol_type = other DNA
gattgtaagtatgagaaatggaagttgg

SEQ ID NO: 6868 - DNA, 28 bp, synthetic construct
  source 1..28: mol_type = other DNA
agggaaggattgtaagtatgagaaatgg

SEQ ID NO: 6869 - DNA, 28 bp, synthetic construct
  source 1..28: mol_type = other DNA
caatccttccctgctgccatcaatcagg

SEQ ID NO: 6870 - DNA, 28 bp, synthetic construct
  source 1..28: mol_type = other DNA
aatccttccctgctgccatcaatcaggg

SEQ ID NO: 6871 - DNA, 28 bp, synthetic construct
  source 1..28: mol_type = other DNA
aagccctgattgatggcagcagggaagg

SEQ ID NO: 6872 - DNA, 28 bp, synthetic construct
  source 1..28: mol_type = other DNA
tttcaagccctgattgatggcagcaggg

SEQ ID NO: 6873 - DNA, 28 bp, synthetic construct
  source 1..28: mol_type = other DNA
atttcaagccctgattgatggcagcagg

SEQ ID NO: 6874 - DNA, 28 bp, synthetic construct
  source 1..28: mol_type = other DNA
ctgccatcaatcagggcttgaaataagg

SEQ ID NO: 6875 - DNA, 28 bp, synthetic construct
  source 1..28: mol_type = other DNA
tgccatcaatcagggcttgaaataaggg

SEQ ID NO: 6876 - DNA, 28 bp, synthetic construct
  source 1..28: mol_type = other DNA
agcccttatttcaagccctgattgatgg

SEQ ID NO: 6877 - DNA, 28 bp, synthetic construct
  source 1..28: mol_type = other DNA
gggcttgaaataagggcttgttatgagg

SEQ ID NO: 6878 - DNA, 28 bp, synthetic construct
  source 1..28: mol_type = other DNA
tgaaataagggcttgttatgaggtatgg

SEQ ID NO: 6879 - DNA, 28 bp, synthetic construct
  source 1..28: mol_type = other DNA
ttcccatccccagtcacatagccaatgg

SEQ ID NO: 6880 - DNA, 28 bp, synthetic construct
  source 1..28: mol_type = other DNA
ggccattggctatgtgactggggatggg

SEQ ID NO: 6881 - DNA, 28 bp, synthetic construct
  source 1..28: mol_type = other DNA
gggccattggctatgtgactggggatgg

SEQ ID NO: 6882 - DNA, 28 bp, synthetic construct
  source 1..28: mol_type = other DNA
cagtgggccattggctatgtgactgggg

SEQ ID NO: 6883 - DNA, 28 bp, synthetic construct
  source 1..28: mol_type = other DNA
acagtgggccattggctatgtgactggg

SEQ ID NO: 6884 - DNA, 28 bp, synthetic construct
  source 1..28: mol_type = other DNA
gacagtgggccattggctatgtgactgg

SEQ ID NO: 6885 - DNA, 28 bp, synthetic construct
  source 1..28: mol_type = other DNA
gcactcgattgggacagtgggccattgg

SEQ ID NO: 6886 - DNA, 28 bp, synthetic construct
  source 1..28: mol_type = other DNA
ttaagttgcactcgattgggacagtggg

SEQ ID NO: 6887 - DNA, 28 bp, synthetic construct
  source 1..28: mol_type = other DNA
gttaagttgcactcgattgggacagtgg

SEQ ID NO: 6888 - DNA, 28 bp, synthetic construct
  source 1..28: mol_type = other DNA
ctgtcccaatcgagtgcaacttaaccgg

SEQ ID NO: 6889 - DNA, 28 bp, synthetic construct
  source 1..28: mol_type = other DNA
ttttccggttaagttgcactcgattggg

SEQ ID NO: 6890 - DNA, 28 bp, synthetic construct
  source 1..28: mol_type = other DNA
attttccggttaagttgcactcgattgg

SEQ ID NO: 6891 - DNA, 28 bp, synthetic construct
  source 1..28: mol_type = other DNA
tcttatgttttgcagctatattttccgg

SEQ ID NO: 6892 - DNA, 28 bp, synthetic construct
  source 1..28: mol_type = other DNA
attactgctaaaaagtcttaccttccgg

SEQ ID NO: 6893 - DNA, 28 bp, synthetic construct
  source 1..28: mol_type = other DNA
ttactgctaaaaagtcttaccttccggg

SEQ ID NO: 6894 - DNA, 28 bp, synthetic construct
  source 1..28: mol_type = other DNA
gctaaaaagtcttaccttccgggtttgg

SEQ ID NO: 6895 - DNA, 28 bp, synthetic construct
  source 1..28: mol_type = other DNA
acagaaatatagcaccaaacccggaagg

SEQ ID NO: 6896 - DNA, 28 bp, synthetic construct
  source 1..28: mol_type = other DNA
gactacagaaatatagcaccaaacccgg

SEQ ID NO: 6897 - DNA, 28 bp, synthetic construct
  source 1..28: mol_type = other DNA
catatgtgagaaatgccatgtaacctgg

SEQ ID NO: 6898 - DNA, 28 bp, synthetic construct
  source 1..28: mol_type = other DNA
ttagctgtgacacatccaggttacatgg

SEQ ID NO: 6899 - DNA, 28 bp, synthetic construct
  source 1..28: mol_type = other DNA
ggaatttcttagctgtgacacatccagg

SEQ ID NO: 6900 - DNA, 28 bp, synthetic construct
  source 1..28: mol_type = other DNA
tccaattccgcaaaatagagccccaagg

SEQ ID NO: 6901 - DNA, 28 bp, synthetic construct
  source 1..28: mol_type = other DNA
gccttggggctctattttgcggaattgg

SEQ ID NO: 6902 - DNA, 28 bp, synthetic construct
  source 1..28: mol_type = other DNA
tttttagccttggggctctattttgcgg

SEQ ID NO: 6903 - DNA, 28 bp, synthetic construct
  source 1..28: mol_type = other DNA
ttaatttttttattttttagccttgggg

SEQ ID NO: 6904 - DNA, 28 bp, synthetic construct
  source 1..28: mol_type = other DNA
tttaatttttttattttttagccttggg

SEQ ID NO: 6905 - DNA, 28 bp, synthetic construct
  source 1..28: mol_type = other DNA
ttttaatttttttattttttagccttgg

SEQ ID NO: 6906 - DNA, 28 bp, synthetic construct
  source 1..28: mol_type = other DNA
tctaggaagtgagtatatttttttgtgg

SEQ ID NO: 6907 - DNA, 28 bp, synthetic construct
  source 1..28: mol_type = other DNA
tactcacttcctagaatgagcagttagg

SEQ ID NO: 6908 - DNA, 28 bp, synthetic construct
  source 1..28: mol_type = other DNA
tacattaaacctaactgctcattctagg

SEQ ID NO: 6909 - DNA, 28 bp, synthetic construct
  source 1..28: mol_type = other DNA
tagaatgagcagttaggtttaatgtagg

SEQ ID NO: 6910 - DNA, 28 bp, synthetic construct
  source 1..28: mol_type = other DNA
attacttttactctcttccttgacaagg

SEQ ID NO: 6911 - DNA, 28 bp, synthetic construct
  source 1..28: mol_type = other DNA
agagctttgcttcttcaccttgtcaagg

SEQ ID NO: 6912 - DNA, 28 bp, synthetic construct
  source 1..28: mol_type = other DNA
aaaattatcagaaacctttaaagaaagg

SEQ ID NO: 6913 - DNA, 28 bp, synthetic construct
  source 1..28: mol_type = other DNA
tatcagaaacctttaaagaaaggagagg

SEQ ID NO: 6914 - DNA, 28 bp, synthetic construct
  source 1..28: mol_type = other DNA
ataatggaacctctcctttctttaaagg

SEQ ID NO: 6915 - DNA, 28 bp, synthetic construct
  source 1..28: mol_type = other DNA
ttgtctgatattggtcattttataatgg

SEQ ID NO: 6916 - DNA, 28 bp, synthetic construct
  source 1..28: mol_type = other DNA
tttgatatttttaccaggctgtttcagg

SEQ ID NO: 6917 - DNA, 28 bp, synthetic construct
  source 1..28: mol_type = other DNA
agtttttgaatttgatatttttaccagg

SEQ ID NO: 6918 - DNA, 28 bp, synthetic construct
  source 1..28: mol_type = other DNA
tgttgattttagagccattgcttccagg

SEQ ID NO: 6919 - DNA, 28 bp, synthetic construct
  source 1..28: mol_type = other DNA
cagattagctctggcctggaagcaatgg

SEQ ID NO: 6920 - DNA, 28 bp, synthetic construct
  source 1..28: mol_type = other DNA
cattgcttccaggccagagctaatctgg

SEQ ID NO: 6921 - DNA, 28 bp, synthetic construct
  source 1..28: mol_type = other DNA
tgcttccaggccagagctaatctggtgg

SEQ ID NO: 6922 - DNA, 28 bp, synthetic construct
  source 1..28: mol_type = other DNA
gaggtccaccagattagctctggcctgg

SEQ ID NO: 6923 - DNA, 28 bp, synthetic construct
  source 1..28: mol_type = other DNA
ttcatgaggtccaccagattagctctgg

SEQ ID NO: 6924 - DNA, 28 bp, synthetic construct
  source 1..28: mol_type = other DNA
agagctaatctggtggacctcatgaagg

SEQ ID NO: 6925 - DNA, 28 bp, synthetic construct
  source 1..28: mol_type = other DNA
aaagtattcagacagtgccttcatgagg

SEQ ID NO: 6926 - DNA, 28 bp, synthetic construct
  source 1..28: mol_type = other DNA
gaaggcactgtctgaatactttccatgg

SEQ ID NO: 6927 - DNA, 28 bp, synthetic construct
  source 1..28: mol_type = other DNA
ttccatggtacgatagttctgtgcaagg

SEQ ID NO: 6928 - DNA, 28 bp, synthetic construct
  source 1..28: mol_type = other DNA
caccttgcacagaactatcgtaccatgg

SEQ ID NO: 6929 - DNA, 28 bp, synthetic construct
  source 1..28: mol_type = other DNA
catggtacgatagttctgtgcaaggtgg

SEQ ID NO: 6930 - DNA, 28 bp, synthetic construct
  source 1..28: mol_type = other DNA
atagttctgtgcaaggtggaaaaaaagg

SEQ ID NO: 6931 - DNA, 28 bp, synthetic construct
  source 1..28: mol_type = other DNA
tagttctgtgcaaggtggaaaaaaaggg

SEQ ID NO: 6932 - DNA, 28 bp, synthetic construct
  source 1..28: mol_type = other DNA
ggaggtgtgaaaattcatgctttctggg

SEQ ID NO: 6933 - DNA, 28 bp, synthetic construct
  source 1..28: mol_type = other DNA
tggaggtgtgaaaattcatgctttctgg

SEQ ID NO: 6934 - DNA, 28 bp, synthetic construct
  source 1..28: mol_type = other DNA
tgtctttttgcagaagtttaaatggagg

SEQ ID NO: 6935 - DNA, 28 bp, synthetic construct
  source 1..28: mol_type = other DNA
cactgtctttttgcagaagtttaaatgg

SEQ ID NO: 6936 - DNA, 28 bp, synthetic construct
  source 1..28: mol_type = other DNA
catttaaacttctgcaaaaagacagtgg

SEQ ID NO: 6937 - DNA, 28 bp, synthetic construct
  source 1..28: mol_type = other DNA
ttaaacttctgcaaaaagacagtggtgg

SEQ ID NO: 6938 - DNA, 28 bp, synthetic construct
  source 1..28: mol_type = other DNA
tcatttgcttcatctctaaaggaagagg

SEQ ID NO: 6939 - DNA, 28 bp, synthetic construct
  source 1..28: mol_type = other DNA
tttctctcatttgcttcatctctaaagg

SEQ ID NO: 6940 - DNA, 28 bp, synthetic construct
  source 1..28: mol_type = other DNA
attgttttacaaatgtagaaatttcagg

SEQ ID NO: 6941 - DNA, 28 bp, synthetic construct
  source 1..28: mol_type = other DNA
ttgttttacaaatgtagaaatttcaggg

SEQ ID NO: 6942 - DNA, 28 bp, synthetic construct
  source 1..28: mol_type = other DNA
tacaaatgtagaaatttcagggtgctgg

SEQ ID NO: 6943 - DNA, 28 bp, synthetic construct
  source 1..28: mol_type = other DNA
aaatttcagggtgctggcagagacctgg

SEQ ID NO: 6944 - DNA, 28 bp, synthetic construct
  source 1..28: mol_type = other DNA
aatttcagggtgctggcagagacctggg

SEQ ID NO: 6945 - DNA, 28 bp, synthetic construct
  source 1..28: mol_type = other DNA
ctggcagagacctgggaagaagaaaagg

SEQ ID NO: 6946 - DNA, 28 bp, synthetic construct
  source 1..28: mol_type = other DNA
tggcagagacctgggaagaagaaaaggg

SEQ ID NO: 6947 - DNA, 28 bp, synthetic construct
  source 1..28: mol_type = other DNA
ctctctcttcccttttcttcttcccagg

SEQ ID NO: 6948 - DNA, 28 bp, synthetic construct
  source 1..28: mol_type = other DNA
ctgctgaattctggagaaagttttttgg

SEQ ID NO: 6949 - DNA, 28 bp, synthetic construct
  source 1..28: mol_type = other DNA
cacaaaagcagatgctgctgaattctgg

SEQ ID NO: 6950 - DNA, 28 bp, synthetic construct
  source 1..28: mol_type = other DNA
ttttgtgatacgaaagttatctccctgg

SEQ ID NO: 6951 - DNA, 28 bp, synthetic construct
  source 1..28: mol_type = other DNA
aagttatctccctggaattgaccattgg

SEQ ID NO: 6952 - DNA, 28 bp, synthetic construct
  source 1..28: mol_type = other DNA
agttatctccctggaattgaccattggg

SEQ ID NO: 6953 - DNA, 28 bp, synthetic construct
  source 1..28: mol_type = other DNA
caatctttcccaatggtcaattccaggg

SEQ ID NO: 6954 - DNA, 28 bp, synthetic construct
  source 1..28: mol_type = other DNA
gcaatctttcccaatggtcaattccagg

SEQ ID NO: 6955 - DNA, 28 bp, synthetic construct
  source 1..28: mol_type = other DNA
cagaaatcaaagcaatctttcccaatgg

SEQ ID NO: 6956 - DNA, 28 bp, synthetic construct
  source 1..28: mol_type = other DNA
ttctgccagcatgtgactgaagataagg

SEQ ID NO: 6957 - DNA, 28 bp, synthetic construct
  source 1..28: mol_type = other DNA
tctgccagcatgtgactgaagataaggg

SEQ ID NO: 6958 - DNA, 28 bp, synthetic construct
  source 1..28: mol_type = other DNA
ctgtcccttatcttcagtcacatgctgg

SEQ ID NO: 6959 - DNA, 28 bp, synthetic construct
  source 1..28: mol_type = other DNA
gacagttttgtgagatttcgtctgtagg

SEQ ID NO: 6960 - DNA, 28 bp, synthetic construct
  source 1..28: mol_type = other DNA
ttgtgagatttcgtctgtaggcacaagg

SEQ ID NO: 6961 - DNA, 28 bp, synthetic construct
  source 1..28: mol_type = other DNA
tgtgagatttcgtctgtaggcacaaggg

SEQ ID NO: 6962 - DNA, 28 bp, synthetic construct
  source 1..28: mol_type = other DNA
gtgggaatcccaaacttaagcttactgg

SEQ ID NO: 6963 - DNA, 28 bp, synthetic construct
  source 1..28: mol_type = other DNA
agaaaacaccagtaagcttaagtttggg

SEQ ID NO: 6964 - DNA, 28 bp, synthetic construct
  source 1..28: mol_type = other DNA
aagaaaacaccagtaagcttaagtttgg

SEQ ID NO: 6965 - DNA, 28 bp, synthetic construct
  source 1..28: mol_type = other DNA
ggagtttggggaatgctgaggcttcagg

SEQ ID NO: 6966 - DNA, 28 bp, synthetic construct
  source 1..28: mol_type = other DNA
gaagcctcagcattccccaaactccagg

SEQ ID NO: 6967 - DNA, 28 bp, synthetic construct
  source 1..28: mol_type = other DNA
taaacctggagtttggggaatgctgagg

SEQ ID NO: 6968 - DNA, 28 bp, synthetic construct
  source 1..28: mol_type = other DNA
tgacagcttataaacctggagtttgggg

SEQ ID NO: 6969 - DNA, 28 bp, synthetic construct
  source 1..28: mol_type = other DNA
ttgacagcttataaacctggagtttggg

SEQ ID NO: 6970 - DNA, 28 bp, synthetic construct
  source 1..28: mol_type = other DNA
tttgacagcttataaacctggagtttgg

SEQ ID NO: 6971 - DNA, 28 bp, synthetic construct
  source 1..28: mol_type = other DNA
aggtggatttgacagcttataaacctgg

SEQ ID NO: 6972 - DNA, 28 bp, synthetic construct
  source 1..28: mol_type = other DNA
agcaggactgcagaaggagctcaggtgg

SEQ ID NO: 6973 - DNA, 28 bp, synthetic construct
  source 1..28: mol_type = other DNA
gtgagcaggactgcagaaggagctcagg

SEQ ID NO: 6974 - DNA, 28 bp, synthetic construct
  source 1..28: mol_type = other DNA
cttgaagagtgagcaggactgcagaagg

SEQ ID NO: 6975 - DNA, 28 bp, synthetic construct
  source 1..28: mol_type = other DNA
cttctgcagtcctgctcactcttcaagg

SEQ ID NO: 6976 - DNA, 28 bp, synthetic construct
  source 1..28: mol_type = other DNA
ctacatggatccttgaagagtgagcagg

SEQ ID NO: 6977 - DNA, 28 bp, synthetic construct
  source 1..28: mol_type = other DNA
ctgctcactcttcaaggatccatgtagg

SEQ ID NO: 6978 - DNA, 28 bp, synthetic construct
  source 1..28: mol_type = other DNA
tgctcactcttcaaggatccatgtaggg

SEQ ID NO: 6979 - DNA, 28 bp, synthetic construct
  source 1..28: mol_type = other DNA
tcactcttcaaggatccatgtagggtgg

SEQ ID NO: 6980 - DNA, 28 bp, synthetic construct
  source 1..28: mol_type = other DNA
cactcttcaaggatccatgtagggtggg

SEQ ID NO: 6981 - DNA, 28 bp, synthetic construct
  source 1..28: mol_type = other DNA
actcttcaaggatccatgtagggtgggg

SEQ ID NO: 6982 - DNA, 28 bp, synthetic construct
  source 1..28: mol_type = other DNA
tttcttatcaggaccccaccctacatgg

SEQ ID NO: 6983 - DNA, 28 bp, synthetic construct
  source 1..28: mol_type = other DNA
actgtagtgacttgtctttcttatcagg

SEQ ID NO: 6984 - DNA, 28 bp, synthetic construct
  source 1..28: mol_type = other DNA
atcttctaaaggcaaaaaaaatggtagg

SEQ ID NO: 6985 - DNA, 28 bp, synthetic construct
  source 1..28: mol_type = other DNA
tgtgatcttctaaaggcaaaaaaaatgg

SEQ ID NO: 6986 - DNA, 28 bp, synthetic construct
  source 1..28: mol_type = other DNA
tttttttgcctttagaagatcacaatgg

SEQ ID NO: 6987 - DNA, 28 bp, synthetic construct
  source 1..28: mol_type = other DNA
gtgaattaccattgtgatcttctaaagg

SEQ ID NO: 6988 - DNA, 28 bp, synthetic construct
  source 1..28: mol_type = other DNA
acaatggtaattcacaaagaactgctgg

SEQ ID NO: 6989 - DNA, 28 bp, synthetic construct
  source 1..28: mol_type = other DNA
ttcacaaagaactgctggcagagatagg

SEQ ID NO: 6990 - DNA, 28 bp, synthetic construct
  source 1..28: mol_type = other DNA
tcacaaagaactgctggcagagataggg

SEQ ID NO: 6991 - DNA, 28 bp, synthetic construct
  source 1..28: mol_type = other DNA
ggtaagaagaatatttcagatgttttgg

SEQ ID NO: 6992 - DNA, 28 bp, synthetic construct
  source 1..28: mol_type = other DNA
gcaataagactctttaaagaaggcaagg

SEQ ID NO: 6993 - DNA, 28 bp, synthetic construct
  source 1..28: mol_type = other DNA
attctcactgagttgggcaagtttctgg

SEQ ID NO: 6994 - DNA, 28 bp, synthetic construct
  source 1..28: mol_type = other DNA
taagtcgtaaatgctgatatgtatcagg

SEQ ID NO: 6995 - DNA, 28 bp, synthetic construct
  source 1..28: mol_type = other DNA
ggtgggctatttttcaactgaagtttgg

SEQ ID NO: 6996 - DNA, 28 bp, synthetic construct
  source 1..28: mol_type = other DNA
gtgggctatttttcaactgaagtttggg

SEQ ID NO: 6997 - DNA, 28 bp, synthetic construct
  source 1..28: mol_type = other DNA
atttttcaactgaagtttgggattttgg

SEQ ID NO: 6998 - DNA, 28 bp, synthetic construct
  source 1..28: mol_type = other DNA
ttattttatttttatctttgtttttagg

SEQ ID NO: 6999 - DNA, 28 bp, synthetic construct
  source 1..28: mol_type = other DNA
tccatgagcttccaagtcttctccacgg

SEQ ID NO: 7000 - DNA, 28 bp, synthetic construct
  source 1..28: mol_type = other DNA
accgtggagaagacttggaagctcatgg

SEQ ID NO: 7001 - DNA, 28 bp, synthetic construct
  source 1..28: mol_type = other DNA
ttattgatgctattcaggatgcagttgg

SEQ ID NO: 7002 - DNA, 28 bp, synthetic construct
  source 1..28: mol_type = other DNA
attttgggtattattgatgctattcagg

SEQ ID NO: 7003 - DNA, 28 bp, synthetic construct
  source 1..28: mol_type = other DNA
aataatacccaaaattcgaccttttcgg

SEQ ID NO: 7004 - DNA, 28 bp, synthetic construct
  source 1..28: mol_type = other DNA
ataatacccaaaattcgaccttttcggg

SEQ ID NO: 7005 - DNA, 28 bp, synthetic construct
  source 1..28: mol_type = other DNA
atggcagaaaccctggtggtcgaggagg

SEQ ID NO: 7006 - DNA, 28 bp, synthetic construct
  source 1..28: mol_type = other DNA
tgaatggcagaaaccctggtggtcgagg

SEQ ID NO: 7007 - DNA, 28 bp, synthetic construct
  source 1..28: mol_type = other DNA
actcaatgaatggcagaaaccctggtgg

SEQ ID NO: 7008 - DNA, 28 bp, synthetic construct
  source 1..28: mol_type = other DNA
caaactcaatgaatggcagaaaccctgg

SEQ ID NO: 7009 - DNA, 28 bp, synthetic construct
  source 1..28: mol_type = other DNA
tctgccattcattgagtttgccatctgg

SEQ ID NO: 7010 - DNA, 28 bp, synthetic construct
  source 1..28: mol_type = other DNA
aattccagatggcaaactcaatgaatgg

SEQ ID NO: 7011 - DNA, 28 bp, synthetic construct
  source 1..28: mol_type = other DNA
ccatctggaattttagttctttaaaagg

SEQ ID NO: 7012 - DNA, 28 bp, synthetic construct
  source 1..28: mol_type = other DNA
aaggtgttcgtgtgtccgtacttggtgg

SEQ ID NO: 7013 - DNA, 28 bp, synthetic construct
  source 1..28: mol_type = other DNA
agaaaggtgttcgtgtgtccgtacttgg

SEQ ID NO: 7014 - DNA, 28 bp, synthetic construct
  source 1..28: mol_type = other DNA
acgaacacctttctttaaatcaacgcgg

SEQ ID NO: 7015 - DNA, 28 bp, synthetic construct
  source 1..28: mol_type = other DNA
cgactcaccgcgttgatttaaagaaagg

SEQ ID NO: 7016 - DNA, 28 bp, synthetic construct
  source 1..28: mol_type = other DNA
tgtgtgttaatttcatttggttcttggg

SEQ ID NO: 7017 - DNA, 28 bp, synthetic construct
  source 1..28: mol_type = other DNA
ttgtgtgttaatttcatttggttcttgg

SEQ ID NO: 7018 - DNA, 28 bp, synthetic construct
  source 1..28: mol_type = other DNA
gggctatttgtgtgttaatttcatttgg

SEQ ID NO: 7019 - DNA, 28 bp, synthetic construct
  source 1..28: mol_type = other DNA
atttttctcttttctcttttcaaatggg

SEQ ID NO: 7020 - DNA, 28 bp, synthetic construct
  source 1..28: mol_type = other DNA
catttttctcttttctcttttcaaatgg

SEQ ID NO: 7021 - DNA, 28 bp, synthetic construct
  source 1..28: mol_type = other DNA
agagaaaagagaaaaatgacaagagcgg

SEQ ID NO: 7022 - DNA, 28 bp, synthetic construct
  source 1..28: mol_type = other DNA
aagagaaaaatgacaagagcggccacgg

SEQ ID NO: 7023 - DNA, 28 bp, synthetic construct
  source 1..28: mol_type = other DNA
aaaaatgacaagagcggccacggaaagg

SEQ ID NO: 7024 - DNA, 28 bp, synthetic construct
  source 1..28: mol_type = other DNA
aatgacaagagcggccacggaaaggagg

SEQ ID NO: 7025 - DNA, 28 bp, synthetic construct
  source 1..28: mol_type = other DNA
cagagaagtgaactcctcctttccgtgg

SEQ ID NO: 7026 - DNA, 28 bp, synthetic construct
  source 1..28: mol_type = other DNA
cacggaaaggaggagttcacttctctgg

SEQ ID NO: 7027 - DNA, 28 bp, synthetic construct
  source 1..28: mol_type = other DNA
aagctttgggttgagggcagaggcgagg

SEQ ID NO: 7028 - DNA, 28 bp, synthetic construct
  source 1..28: mol_type = other DNA
aaacaaagctttgggttgagggcagagg

SEQ ID NO: 7029 - DNA, 28 bp, synthetic construct
  source 1..28: mol_type = other DNA
tgccctcaacccaaagctttgtttcagg

SEQ ID NO: 7030 - DNA, 28 bp, synthetic construct
  source 1..28: mol_type = other DNA
gtcctgaaacaaagctttgggttgaggg

SEQ ID NO: 7031 - DNA, 28 bp, synthetic construct
  source 1..28: mol_type = other DNA
cgtcctgaaacaaagctttgggttgagg

SEQ ID NO: 7032 - DNA, 28 bp, synthetic construct
  source 1..28: mol_type = other DNA
cacaggcgtcctgaaacaaagctttggg

SEQ ID NO: 7033 - DNA, 28 bp, synthetic construct
  source 1..28: mol_type = other DNA
acacaggcgtcctgaaacaaagctttgg

SEQ ID NO: 7034 - DNA, 28 bp, synthetic construct
  source 1..28: mol_type = other DNA
ggacgcctgtgtcccttccctgctcagg

SEQ ID NO: 7035 - DNA, 28 bp, synthetic construct
  source 1..28: mol_type = other DNA
aggggcctgagcagggaagggacacagg

SEQ ID NO: 7036 - DNA, 28 bp, synthetic construct
  source 1..28: mol_type = other DNA
tcccttccctgctcaggccccttcccgg

SEQ ID NO: 7037 - DNA, 28 bp, synthetic construct
  source 1..28: mol_type = other DNA
gccgggaaggggcctgagcagggaaggg

SEQ ID NO: 7038 - DNA, 28 bp, synthetic construct
  source 1..28: mol_type = other DNA
ggccgggaaggggcctgagcagggaagg

SEQ ID NO: 7039 - DNA, 28 bp, synthetic construct
  source 1..28: mol_type = other DNA
gaggggccgggaaggggcctgagcaggg

SEQ ID NO: 7040 - DNA, 28 bp, synthetic construct
  source 1..28: mol_type = other DNA
cgaggggccgggaaggggcctgagcagg

SEQ ID NO: 7041 - DNA, 28 bp, synthetic construct
  source 1..28: mol_type = other DNA
ctgctcaggccccttcccggcccctcgg

SEQ ID NO: 7042 - DNA, 28 bp, synthetic construct
  source 1..28: mol_type = other DNA
tgctcaggccccttcccggcccctcggg

SEQ ID NO: 7043 - DNA, 28 bp, synthetic construct
  source 1..28: mol_type = other DNA
agctcagacccgaggggccgggaagggg

SEQ ID NO: 7044 - DNA, 28 bp, synthetic construct
  source 1..28: mol_type = other DNA
cagctcagacccgaggggccgggaaggg

SEQ ID NO: 7045 - DNA, 28 bp, synthetic construct
  source 1..28: mol_type = other DNA
gcagctcagacccgaggggccgggaagg

SEQ ID NO: 7046 - DNA, 28 bp, synthetic construct
  source 1..28: mol_type = other DNA
tcccggcccctcgggtctgagctgcagg

SEQ ID NO: 7047 - DNA, 28 bp, synthetic construct
  source 1..28: mol_type = other DNA
tcctgcagctcagacccgaggggccggg

SEQ ID NO: 7048 - DNA, 28 bp, synthetic construct
  source 1..28: mol_type = other DNA
ctcctgcagctcagacccgaggggccgg

SEQ ID NO: 7049 - DNA, 28 bp, synthetic construct
  source 1..28: mol_type = other DNA
cggcccctcgggtctgagctgcaggagg

SEQ ID NO: 7050 - DNA, 28 bp, synthetic construct
  source 1..28: mol_type = other DNA
cttcctcctgcagctcagacccgagggg

SEQ ID NO: 7051 - DNA, 28 bp, synthetic construct
  source 1..28: mol_type = other DNA
ccctcgggtctgagctgcaggaggaagg

SEQ ID NO: 7052 - DNA, 28 bp, synthetic construct
  source 1..28: mol_type = other DNA
accttcctcctgcagctcagacccgagg

SEQ ID NO: 7053 - DNA, 28 bp, synthetic construct
  source 1..28: mol_type = other DNA
gcggtgaggactgcagcaggcggccggg

SEQ ID NO: 7054 - DNA, 28 bp, synthetic construct
  source 1..28: mol_type = other DNA
ggcggtgaggactgcagcaggcggccgg

SEQ ID NO: 7055 - DNA, 28 bp, synthetic construct
  source 1..28: mol_type = other DNA
agacggcggtgaggactgcagcaggcgg

SEQ ID NO: 7056 - DNA, 28 bp, synthetic construct
  source 1..28: mol_type = other DNA
ggcagacggcggtgaggactgcagcagg

SEQ ID NO: 7057 - DNA, 28 bp, synthetic construct
  source 1..28: mol_type = other DNA
gctgcagtcctcaccgccgtctgcctgg

SEQ ID NO: 7058 - DNA, 28 bp, synthetic construct
  source 1..28: mol_type = other DNA
gagggcgtccaggcagacggcggtgagg

SEQ ID NO: 7059 - DNA, 28 bp, synthetic construct
  source 1..28: mol_type = other DNA
agggagagggcgtccaggcagacggcgg

SEQ ID NO: 7060 - DNA, 28 bp, synthetic construct
  source 1..28: mol_type = other DNA
aggagggagagggcgtccaggcagacgg

SEQ ID NO: 7061 - DNA, 28 bp, synthetic construct
  source 1..28: mol_type = other DNA
gcctggacgccctctccctcctccccgg

SEQ ID NO: 7062 - DNA, 28 bp, synthetic construct
  source 1..28: mol_type = other DNA
gccggggaggagggagagggcgtccagg

SEQ ID NO: 7063 - DNA, 28 bp, synthetic construct
  source 1..28: mol_type = other DNA
cgccctctccctcctccccggcctgcgg

SEQ ID NO: 7064 - DNA, 28 bp, synthetic construct
  source 1..28: mol_type = other DNA
gccctctccctcctccccggcctgcggg

SEQ ID NO: 7065 - DNA, 28 bp, synthetic construct
  source 1..28: mol_type = other DNA
acccgcaggccggggaggagggagaggg

SEQ ID NO: 7066 - DNA, 28 bp, synthetic construct
  source 1..28: mol_type = other DNA
aacccgcaggccggggaggagggagagg

SEQ ID NO: 7067 - DNA, 28 bp, synthetic construct
  source 1..28: mol_type = other DNA
tccctcctccccggcctgcgggttctgg

SEQ ID NO: 7068 - DNA, 28 bp, synthetic construct
  source 1..28: mol_type = other DNA
accagaacccgcaggccggggaggaggg

SEQ ID NO: 7069 - DNA, 28 bp, synthetic construct
  source 1..28: mol_type = other DNA
gaccagaacccgcaggccggggaggagg

SEQ ID NO: 7070 - DNA, 28 bp, synthetic construct
  source 1..28: mol_type = other DNA
aaagaccagaacccgcaggccggggagg

SEQ ID NO: 7071 - DNA, 28 bp, synthetic construct
  source 1..28: mol_type = other DNA
aaggcaagaagggaaggggtcgccgggg

SEQ ID NO: 7072 - DNA, 28 bp, synthetic construct
  source 1..28: mol_type = other DNA
aaaggcaagaagggaaggggtcgccggg

SEQ ID NO: 7073 - DNA, 28 bp, synthetic construct
  source 1..28: mol_type = other DNA
gaaaggcaagaagggaaggggtcgccgg

SEQ ID NO: 7074 - DNA, 28 bp, synthetic construct
  source 1..28: mol_type = other DNA
ggcgaccccttcccttcttgcctttcgg

SEQ ID NO: 7075 - DNA, 28 bp, synthetic construct
  source 1..28: mol_type = other DNA
cggcgccgaaaggcaagaagggaagggg

SEQ ID NO: 7076 - DNA, 28 bp, synthetic construct
  source 1..28: mol_type = other DNA
acggcgccgaaaggcaagaagggaaggg

SEQ ID NO: 7077 - DNA, 28 bp, synthetic construct
  source 1..28: mol_type = other DNA
tacggcgccgaaaggcaagaagggaagg

SEQ ID NO: 7078 - DNA, 28 bp, synthetic construct
  source 1..28: mol_type = other DNA
cagctacggcgccgaaaggcaagaaggg

SEQ ID NO: 7079 - DNA, 28 bp, synthetic construct
  source 1..28: mol_type = other DNA
acagctacggcgccgaaaggcaagaagg

SEQ ID NO: 7080 - DNA, 28 bp, synthetic construct
  source 1..28: mol_type = other DNA
gtctctggacagctacggcgccgaaagg

SEQ ID NO: 7081 - DNA, 28 bp, synthetic construct
  source 1..28: mol_type = other DNA
gcacacgcgtgtctctggacagctacgg

SEQ ID NO: 7082 - DNA, 28 bp, synthetic construct
  source 1..28: mol_type = other DNA
agctgtccagagacacgcgtgtgcgcgg

SEQ ID NO: 7083 - DNA, 28 bp, synthetic construct
  source 1..28: mol_type = other DNA
gctgtccagagacacgcgtgtgcgcggg

SEQ ID NO: 7084 - DNA, 28 bp, synthetic construct
  source 1..28: mol_type = other DNA
tgggacccgcgcacacgcgtgtctctgg

SEQ ID NO: 7085 - DNA, 28 bp, synthetic construct
  source 1..28: mol_type = other DNA
acactgggctgcgtgcgtgtggagtggg

SEQ ID NO: 7086 - DNA, 28 bp, synthetic construct
  source 1..28: mol_type = other DNA
cacactgggctgcgtgcgtgtggagtgg

SEQ ID NO: 7087 - DNA, 28 bp, synthetic construct
  source 1..28: mol_type = other DNA
ccacacgcacgcagcccagtgtgtgtgg

SEQ ID NO: 7088 - DNA, 28 bp, synthetic construct
  source 1..28: mol_type = other DNA
cacacgcacgcagcccagtgtgtgtggg

SEQ ID NO: 7089 - DNA, 28 bp, synthetic construct
  source 1..28: mol_type = other DNA
acacgcacgcagcccagtgtgtgtgggg

SEQ ID NO: 7090 - DNA, 28 bp, synthetic construct
  source 1..28: mol_type = other DNA
gcagcccagtgtgtgtggggagccccgg

SEQ ID NO: 7091 - DNA, 28 bp, synthetic construct
  source 1..28: mol_type = other DNA
cccagtgtgtgtggggagccccggctgg

SEQ ID NO: 7092 - DNA, 28 bp, synthetic construct
  source 1..28: mol_type = other DNA
ccagtgtgtgtggggagccccggctggg

SEQ ID NO: 7093 - DNA, 28 bp, synthetic construct
  source 1..28: mol_type = other DNA
gtgtgtggggagccccggctgggagtgg

SEQ ID NO: 7094 - DNA, 28 bp, synthetic construct
  source 1..28: mol_type = other DNA
tgtgtggggagccccggctgggagtggg

SEQ ID NO: 7095 - DNA, 28 bp, synthetic construct
  source 1..28: mol_type = other DNA
ttctcagcgatcccactcccagccgggg

SEQ ID NO: 7096 - DNA, 28 bp, synthetic construct
  source 1..28: mol_type = other DNA
gttctcagcgatcccactcccagccggg

SEQ ID NO: 7097 - DNA, 28 bp, synthetic construct
  source 1..28: mol_type = other DNA
tgttctcagcgatcccactcccagccgg

SEQ ID NO: 7098 - DNA, 28 bp, synthetic construct
  source 1..28: mol_type = other DNA
gctgagaacagctcgctcccgaagaagg

SEQ ID NO: 7099 - DNA, 28 bp, synthetic construct
  source 1..28: mol_type = other DNA
ctgcgcgctgggttgctccttcttcggg

SEQ ID NO: 7100 - DNA, 28 bp, synthetic construct
  source 1..28: mol_type = other DNA
ccgaagaaggagcaacccagcgcgcagg

SEQ ID NO: 7101 - DNA, 28 bp, synthetic construct
  source 1..28: mol_type = other DNA
acccagcgcgcaggcctccgagacgtgg

SEQ ID NO: 7102 - DNA, 28 bp, synthetic construct
  source 1..28: mol_type = other DNA
tccacgtctcggaggcctgcgcgctggg

SEQ ID NO: 7103 - DNA, 28 bp, synthetic construct
  source 1..28: mol_type = other DNA
ttccacgtctcggaggcctgcgcgctgg

SEQ ID NO: 7104 - DNA, 28 bp, synthetic construct
  source 1..28: mol_type = other DNA
taattgttgcgtttccacgtctcggagg

SEQ ID NO: 7105 - DNA, 28 bp, synthetic construct
  source 1..28: mol_type = other DNA
cggtaattgttgcgtttccacgtctcgg

SEQ ID NO: 7106 - DNA, 28 bp, synthetic construct
  source 1..28: mol_type = other DNA
gagagcgggtgtggatttgtcttgacgg

SEQ ID NO: 7107 - DNA, 28 bp, synthetic construct
  source 1..28: mol_type = other DNA
gtcgggcgggaggggagagcgggtgtgg

SEQ ID NO: 7108 - DNA, 28 bp, synthetic construct
  source 1..28: mol_type = other DNA
acccgctctcccctcccgcccgactcgg

SEQ ID NO: 7109 - DNA, 28 bp, synthetic construct
  source 1..28: mol_type = other DNA
cccgctctcccctcccgcccgactcggg

SEQ ID NO: 7110 - DNA, 28 bp, synthetic construct
  source 1..28: mol_type = other DNA
ccgctctcccctcccgcccgactcgggg

SEQ ID NO: 7111 - DNA, 28 bp, synthetic construct
  source 1..28: mol_type = other DNA
ctctcccctcccgcccgactcggggagg

SEQ ID NO: 7112 - DNA, 28 bp, synthetic construct
  source 1..28: mol_type = other DNA
gcggcctccccgagtcgggcgggagggg

SEQ ID NO: 7113 - DNA, 28 bp, synthetic construct
  source 1..28: mol_type = other DNA
cgcggcctccccgagtcgggcgggaggg

SEQ ID NO: 7114 - DNA, 28 bp, synthetic construct
  source 1..28: mol_type = other DNA
cctcccgcccgactcggggaggccgcgg

SEQ ID NO: 7115 - DNA, 28 bp, synthetic construct
  source 1..28: mol_type = other DNA
ctcccgcccgactcggggaggccgcggg

SEQ ID NO: 7116 - DNA, 28 bp, synthetic construct
  source 1..28: mol_type = other DNA
gtcccgcggcctccccgagtcgggcggg

SEQ ID NO: 7117 - DNA, 28 bp, synthetic construct
  source 1..28: mol_type = other DNA
cgtcccgcggcctccccgagtcgggcgg

SEQ ID NO: 7118 - DNA, 28 bp, synthetic construct
  source 1..28: mol_type = other DNA
cggcgtcccgcggcctccccgagtcggg

SEQ ID NO: 7119 - DNA, 28 bp, synthetic construct
  source 1..28: mol_type = other DNA
gcggcgtcccgcggcctccccgagtcgg

SEQ ID NO: 7120 - DNA, 28 bp, synthetic construct
  source 1..28: mol_type = other DNA
ctgctagtgctgctgcggcgtcccgcgg

SEQ ID NO: 7121 - DNA, 28 bp, synthetic construct
  source 1..28: mol_type = other DNA
cgcgggacgccgcagcagcactagcagg

SEQ ID NO: 7122 - DNA, 28 bp, synthetic construct
  source 1..28: mol_type = other DNA
gggacgccgcagcagcactagcaggagg

SEQ ID NO: 7123 - DNA, 28 bp, synthetic construct
  source 1..28: mol_type = other DNA
acgccgcagcagcactagcaggaggagg

SEQ ID NO: 7124 - DNA, 28 bp, synthetic construct
  source 1..28: mol_type = other DNA
tctcctcctcctgctagtgctgctgcgg

SEQ ID NO: 7125 - DNA, 28 bp, synthetic construct
  source 1..28: mol_type = other DNA
ctagcaggaggaggagaccgctcgctgg

SEQ ID NO: 7126 - DNA, 28 bp, synthetic construct
  source 1..28: mol_type = other DNA
ccgctcgctggacaccccacccctgtgg

SEQ ID NO: 7127 - DNA, 28 bp, synthetic construct
  source 1..28: mol_type = other DNA
gacaccccacccctgtggcacacacagg

SEQ ID NO: 7128 - DNA, 28 bp, synthetic construct
  source 1..28: mol_type = other DNA
caaggcacgaaggagctaaccaataagg

SEQ ID NO: 7129 - DNA, 28 bp, synthetic construct
  source 1..28: mol_type = other DNA
aaggcacgaaggagctaaccaataaggg

SEQ ID NO: 7130 - DNA, 28 bp, synthetic construct
  source 1..28: mol_type = other DNA
aggcacgaaggagctaaccaataagggg

SEQ ID NO: 7131 - DNA, 28 bp, synthetic construct
  source 1..28: mol_type = other DNA
cacgaaggagctaaccaataaggggtgg

SEQ ID NO: 7132 - DNA, 28 bp, synthetic construct
  source 1..28: mol_type = other DNA
aaggagctaaccaataaggggtggcagg

SEQ ID NO: 7133 - DNA, 28 bp, synthetic construct
  source 1..28: mol_type = other DNA
gagctaaccaataaggggtggcaggtgg

SEQ ID NO: 7134 - DNA, 28 bp, synthetic construct
  source 1..28: mol_type = other DNA
agctaaccaataaggggtggcaggtggg

SEQ ID NO: 7135 - DNA, 28 bp, synthetic construct
  source 1..28: mol_type = other DNA
ctcacgcccacctgccaccccttattgg

SEQ ID NO: 7136 - DNA, 28 bp, synthetic construct
  source 1..28: mol_type = other DNA
aggggtggcaggtgggcgtgagcgtcgg

SEQ ID NO: 7137 - DNA, 28 bp, synthetic construct
  source 1..28: mol_type = other DNA
ggggtggcaggtgggcgtgagcgtcggg

SEQ ID NO: 7138 - DNA, 28 bp, synthetic construct
  source 1..28: mol_type = other DNA
ggcaggtgggcgtgagcgtcgggaccgg

SEQ ID NO: 7139 - DNA, 28 bp, synthetic construct
  source 1..28: mol_type = other DNA
gcaggtgggcgtgagcgtcgggaccggg

SEQ ID NO: 7140 - DNA, 28 bp, synthetic construct
  source 1..28: mol_type = other DNA
gtcgggaccgggagccaaagccatctgg

SEQ ID NO: 7141 - DNA, 28 bp, synthetic construct
  source 1..28: mol_type = other DNA
tcgggaccgggagccaaagccatctggg

SEQ ID NO: 7142 - DNA, 28 bp, synthetic construct
  source 1..28: mol_type = other DNA
cgggaccgggagccaaagccatctgggg

SEQ ID NO: 7143 - DNA, 28 bp, synthetic construct
  source 1..28: mol_type = other DNA
ttcagccccagatggctttggctcccgg

SEQ ID NO: 7144 - DNA, 28 bp, synthetic construct
  source 1..28: mol_type = other DNA
ggagccaaagccatctggggctgaaagg

SEQ ID NO: 7145 - DNA, 28 bp, synthetic construct
  source 1..28: mol_type = other DNA
gccaaagccatctggggctgaaaggcgg

SEQ ID NO: 7146 - DNA, 28 bp, synthetic construct
  source 1..28: mol_type = other DNA
ccaaagccatctggggctgaaaggcggg

SEQ ID NO: 7147 - DNA, 28 bp, synthetic construct
  source 1..28: mol_type = other DNA
ggaagtcccgcctttcagccccagatgg

SEQ ID NO: 7148 - DNA, 28 bp, synthetic construct
  source 1..28: mol_type = other DNA
aaaagactaggaaggtaagcgaagcagg

SEQ ID NO: 7149 - DNA, 28 bp, synthetic construct
  source 1..28: mol_type = other DNA
gttgctatgaaacaaaagactaggaagg

SEQ ID NO: 7150 - DNA, 28 bp, synthetic construct
  source 1..28: mol_type = other DNA
ctctgttgctatgaaacaaaagactagg

SEQ ID NO: 7151 - DNA, 28 bp, synthetic construct
  source 1..28: mol_type = other DNA
cttttgtttcatagcaacagagtagtgg

SEQ ID NO: 7152 - DNA, 28 bp, synthetic construct
  source 1..28: mol_type = other DNA
tgtttcatagcaacagagtagtggctgg

SEQ ID NO: 7153 - DNA, 28 bp, synthetic construct
  source 1..28: mol_type = other DNA
tcatagcaacagagtagtggctggaagg

SEQ ID NO: 7154 - DNA, 28 bp, synthetic construct
  source 1..28: mol_type = other DNA
catagcaacagagtagtggctggaaggg

SEQ ID NO: 7155 - DNA, 28 bp, synthetic construct
  source 1..28: mol_type = other DNA
ctggaagggtgttgcttctccgctctgg

SEQ ID NO: 7156 - DNA, 28 bp, synthetic construct
  source 1..28: mol_type = other DNA
tggaagggtgttgcttctccgctctggg

SEQ ID NO: 7157 - DNA, 28 bp, synthetic construct
  source 1..28: mol_type = other DNA
aagggtgttgcttctccgctctgggcgg

SEQ ID NO: 7158 - DNA, 28 bp, synthetic construct
  source 1..28: mol_type = other DNA
agggtgttgcttctccgctctgggcggg

SEQ ID NO: 7159 - DNA, 28 bp, synthetic construct
  source 1..28: mol_type = other DNA
tctccgctctgggcgggtccaacgctgg

SEQ ID NO: 7160 - DNA, 28 bp, synthetic construct
  source 1..28: mol_type = other DNA
tctccagcgttggacccgcccagagcgg

SEQ ID NO: 7161 - DNA, 28 bp, synthetic construct
  source 1..28: mol_type = other DNA
ctagggagatgaatttctccagcgttgg

SEQ ID NO: 7162 - DNA, 28 bp, synthetic construct
  source 1..28: mol_type = other DNA
caacgctggagaaattcatctccctagg

SEQ ID NO: 7163 - DNA, 28 bp, synthetic construct
  source 1..28: mol_type = other DNA
aacgctggagaaattcatctccctaggg

SEQ ID NO: 7164 - DNA, 28 bp, synthetic construct
  source 1..28: mol_type = other DNA
tgggtagaagggtttggcagccctaggg

SEQ ID NO: 7165 - DNA, 28 bp, synthetic construct
  source 1..28: mol_type = other DNA
ctgggtagaagggtttggcagccctagg

SEQ ID NO: 7166 - DNA, 28 bp, synthetic construct
  source 1..28: mol_type = other DNA
ctagggctgccaaacccttctacccagg

SEQ ID NO: 7167 - DNA, 28 bp, synthetic construct
  source 1..28: mol_type = other DNA
ggctgctgtcctgggtagaagggtttgg

SEQ ID NO: 7168 - DNA, 28 bp, synthetic construct
  source 1..28: mol_type = other DNA
tgtttggctgctgtcctgggtagaaggg

SEQ ID NO: 7169 - DNA, 28 bp, synthetic construct
  source 1..28: mol_type = other DNA
ctgtttggctgctgtcctgggtagaagg

SEQ ID NO: 7170 - DNA, 28 bp, synthetic construct
  source 1..28: mol_type = other DNA
cttctacccaggacagcagccaaacagg

SEQ ID NO: 7171 - DNA, 28 bp, synthetic construct
  source 1..28: mol_type = other DNA
catagacctgtttggctgctgtcctggg

SEQ ID NO: 7172 - DNA, 28 bp, synthetic construct
  source 1..28: mol_type = other DNA
tcatagacctgtttggctgctgtcctgg

SEQ ID NO: 7173 - DNA, 28 bp, synthetic construct
  source 1..28: mol_type = other DNA
caagaagcaacgtcatagacctgtttgg

SEQ ID NO: 7174 - DNA, 28 bp, synthetic construct
  source 1..28: mol_type = other DNA
acaggtctatgacgttgcttcttgttgg

SEQ ID NO: 7175 - DNA, 28 bp, synthetic construct
  source 1..28: mol_type = other DNA
tttattctgcattttagaagctcagtgg

SEQ ID NO: 7176 - DNA, 28 bp, synthetic construct
  source 1..28: mol_type = other DNA
atgcagaataaatctcacagagagtagg

SEQ ID NO: 7177 - DNA, 28 bp, synthetic construct
  source 1..28: mol_type = other DNA
agaataaatctcacagagagtaggctgg

SEQ ID NO: 7178 - DNA, 28 bp, synthetic construct
  source 1..28: mol_type = other DNA
gaataaatctcacagagagtaggctggg

SEQ ID NO: 7179 - DNA, 28 bp, synthetic construct
  source 1..28: mol_type = other DNA
aataaatctcacagagagtaggctgggg

SEQ ID NO: 7180 - DNA, 28 bp, synthetic construct
  source 1..28: mol_type = other DNA
actcggaaacttgggaagtttcagttgg

SEQ ID NO: 7181 - DNA, 28 bp, synthetic construct
  source 1..28: mol_type = other DNA
cagcaaaagagaaactcggaaacttggg

SEQ ID NO: 7182 - DNA, 28 bp, synthetic construct
  source 1..28: mol_type = other DNA
acagcaaaagagaaactcggaaacttgg

SEQ ID NO: 7183 - DNA, 28 bp, synthetic construct
  source 1..28: mol_type = other DNA
taaaactaacagcaaaagagaaactcgg

SEQ ID NO: 7184 - DNA, 28 bp, synthetic construct
  source 1..28: mol_type = other DNA
gtttctcttttgctgttagttttagagg

SEQ ID NO: 7185 - DNA, 28 bp, synthetic construct
  source 1..28: mol_type = other DNA
tttctcttttgctgttagttttagaggg

SEQ ID NO: 7186 - DNA, 28 bp, synthetic construct
  source 1..28: mol_type = other DNA
ttagagggattgcagaccaaacatcagg

SEQ ID NO: 7187 - DNA, 28 bp, synthetic construct
  source 1..28: mol_type = other DNA
tttgctttttcatcagcctgatgtttgg

SEQ ID NO: 7188 - DNA, 28 bp, synthetic construct
  source 1..28: mol_type = other DNA
tgaaaaagcaaatagttgacaacgctgg

SEQ ID NO: 7189 - DNA, 28 bp, synthetic construct
  source 1..28: mol_type = other DNA
tttggcatgattagcagagactgtttgg

SEQ ID NO: 7190 - DNA, 28 bp, synthetic construct
  source 1..28: mol_type = other DNA
ccaaagcaataaaagtaccagataatgg

SEQ ID NO: 7191 - DNA, 28 bp, synthetic construct
  source 1..28: mol_type = other DNA
caaagcaataaaagtaccagataatggg

SEQ ID NO: 7192 - DNA, 28 bp, synthetic construct
  source 1..28: mol_type = other DNA
gtatttatcagcaattcccattatctgg

SEQ ID NO: 7193 - DNA, 28 bp, synthetic construct
  source 1..28: mol_type = other DNA
aacttgcactaagtaaaaaggtgcaagg

SEQ ID NO: 7194 - DNA, 28 bp, synthetic construct
  source 1..28: mol_type = other DNA
aggcagaaacttgcactaagtaaaaagg

SEQ ID NO: 7195 - DNA, 28 bp, synthetic construct
  source 1..28: mol_type = other DNA
gtgcaagtttctgcctaaatgactgagg

SEQ ID NO: 7196 - DNA, 28 bp, synthetic construct
  source 1..28: mol_type = other DNA
caagtttctgcctaaatgactgaggagg

SEQ ID NO: 7197 - DNA, 28 bp, synthetic construct
  source 1..28: mol_type = other DNA
gtagctgtctcctcctcagtcatttagg

SEQ ID NO: 7198 - DNA, 28 bp, synthetic construct
  source 1..28: mol_type = other DNA
ggaggagacagctactgtgttttgtcgg

SEQ ID NO: 7199 - DNA, 28 bp, synthetic construct
  source 1..28: mol_type = other DNA
tttaaatggatagaaatctatgtaaagg

SEQ ID NO: 7200 - DNA, 28 bp, synthetic construct
  source 1..28: mol_type = other DNA
cagctacagtaaggttgtttttaaatgg

SEQ ID NO: 7201 - DNA, 28 bp, synthetic construct
  source 1..28: mol_type = other DNA
ctggtagagaatggcagctacagtaagg

SEQ ID NO: 7202 - DNA, 28 bp, synthetic construct
  source 1..28: mol_type = other DNA
aagaggtaacaatgctggtagagaatgg

SEQ ID NO: 7203 - DNA, 28 bp, synthetic construct
  source 1..28: mol_type = other DNA
ctaccagcattgttacctctttctgtgg

SEQ ID NO: 7204 - DNA, 28 bp, synthetic construct
  source 1..28: mol_type = other DNA
gagccacagaaagaggtaacaatgctgg

SEQ ID NO: 7205 - DNA, 28 bp, synthetic construct
  source 1..28: mol_type = other DNA
gcacaaagaagggagccacagaaagagg

SEQ ID NO: 7206 - DNA, 28 bp, synthetic construct
  source 1..28: mol_type = other DNA
ggctcccttctttgtgctcttaaaaagg

SEQ ID NO: 7207 - DNA, 28 bp, synthetic construct
  source 1..28: mol_type = other DNA
tcggcctttttaagagcacaaagaaggg

SEQ ID NO: 7208 - DNA, 28 bp, synthetic construct
  source 1..28: mol_type = other DNA
gtcggcctttttaagagcacaaagaagg

SEQ ID NO: 7209 - DNA, 28 bp, synthetic construct
  source 1..28: mol_type = other DNA
ttgtgctcttaaaaaggccgacatctgg

SEQ ID NO: 7210 - DNA, 28 bp, synthetic construct
  source 1..28: mol_type = other DNA
aggccgacatctggctagtctttaaagg

SEQ ID NO: 7211 - DNA, 28 bp, synthetic construct
  source 1..28: mol_type = other DNA
tctcctttaaagactagccagatgtcgg

SEQ ID NO: 7212 - DNA, 28 bp, synthetic construct
  source 1..28: mol_type = other DNA
tctttaaaggagaaagctactgtgctgg

SEQ ID NO: 7213 - DNA, 28 bp, synthetic construct
  source 1..28: mol_type = other DNA
ctttaaaggagaaagctactgtgctggg

SEQ ID NO: 7214 - DNA, 28 bp, synthetic construct
  source 1..28: mol_type = other DNA
gggacttgtctttcagcaatatcatagg

SEQ ID NO: 7215 - DNA, 28 bp, synthetic construct
  source 1..28: mol_type = other DNA
attgaagtaaactgaaataaatggaagg

SEQ ID NO: 7216 - DNA, 28 bp, synthetic construct
  source 1..28: mol_type = other DNA
tgggattgaagtaaactgaaataaatgg

SEQ ID NO: 7217 - DNA, 28 bp, synthetic construct
  source 1..28: mol_type = other DNA
agcaattgttggtagcatgagtggtggg

SEQ ID NO: 7218 - DNA, 28 bp, synthetic construct
  source 1..28: mol_type = other DNA
gagcaattgttggtagcatgagtggtgg

SEQ ID NO: 7219 - DNA, 28 bp, synthetic construct
  source 1..28: mol_type = other DNA
ccactcatgctaccaacaattgctctgg

SEQ ID NO: 7220 - DNA, 28 bp, synthetic construct
  source 1..28: mol_type = other DNA
aaagtatgaagtccagagcaattgttgg

SEQ ID NO: 7221 - DNA, 28 bp, synthetic construct
  source 1..28: mol_type = other DNA
aacaattgctctggacttcatactttgg

SEQ ID NO: 7222 - DNA, 28 bp, synthetic construct
  source 1..28: mol_type = other DNA
gtgtaataaacgctatcaactgtagtgg

SEQ ID NO: 7223 - DNA, 28 bp, synthetic construct
  source 1..28: mol_type = other DNA
atagcgtttattacacttttcagcttgg

SEQ ID NO: 7224 - DNA, 28 bp, synthetic construct
  source 1..28: mol_type = other DNA
tctcagatgttctgatattttacattgg

SEQ ID NO: 7225 - DNA, 28 bp, synthetic construct
  source 1..28: mol_type = other DNA
ctcagatgttctgatattttacattggg

SEQ ID NO: 7226 - DNA, 28 bp, synthetic construct
  source 1..28: mol_type = other DNA
ttgagaaacattttatcaggttacgtgg

SEQ ID NO: 7227 - DNA, 28 bp, synthetic construct
  source 1..28: mol_type = other DNA
cgtaacctgataaaatgtttctcaatgg

SEQ ID NO: 7228 - DNA, 28 bp, synthetic construct
  source 1..28: mol_type = other DNA
tagaaccattgagaaacattttatcagg

SEQ ID NO: 7229 - DNA, 28 bp, synthetic construct
  source 1..28: mol_type = other DNA
attaaaattcttagttgctagaaagtgg

SEQ ID NO: 7230 - DNA, 28 bp, synthetic construct
  source 1..28: mol_type = other DNA
tttaatactgtaattattactatgaagg

SEQ ID NO: 7231 - DNA, 28 bp, synthetic construct
  source 1..28: mol_type = other DNA
aattcaaggctgtaaaggaaaactcagg

SEQ ID NO: 7232 - DNA, 28 bp, synthetic construct
  source 1..28: mol_type = other DNA
tttcctttacagccttgaatttacatgg

SEQ ID NO: 7233 - DNA, 28 bp, synthetic construct
  source 1..28: mol_type = other DNA
taaccatgtaaattcaaggctgtaaagg

SEQ ID NO: 7234 - DNA, 28 bp, synthetic construct
  source 1..28: mol_type = other DNA
ttaaaatcttaaccatgtaaattcaagg

SEQ ID NO: 7235 - DNA, 28 bp, synthetic construct
  source 1..28: mol_type = other DNA
aaaaaatgtgcctttgcaaccagtcagg

SEQ ID NO: 7236 - DNA, 28 bp, synthetic construct
  source 1..28: mol_type = other DNA
cactttatcacctgactggttgcaaagg

SEQ ID NO: 7237 - DNA, 28 bp, synthetic construct
  source 1..28: mol_type = other DNA
ccagtcaggtgataaagtgtgattcagg

SEQ ID NO: 7238 - DNA, 28 bp, synthetic construct
  source 1..28: mol_type = other DNA
aattactggcacagaaataatgacaagg

SEQ ID NO: 7239 - DNA, 28 bp, synthetic construct
  source 1..28: mol_type = other DNA
aaacaaggaactactctttaattactgg

SEQ ID NO: 7240 - DNA, 28 bp, synthetic construct
  source 1..28: mol_type = other DNA
tgtagataaatgcaatgtgaaaacaagg

SEQ ID NO: 7241 - DNA, 28 bp, synthetic construct
  source 1..28: mol_type = other DNA
acattgcatttatctacaaaagtgctgg

SEQ ID NO: 7242 - DNA, 28 bp, synthetic construct
  source 1..28: mol_type = other DNA
atggatgggtggaggagatatggagagg

SEQ ID NO: 7243 - DNA, 28 bp, synthetic construct
  source 1..28: mol_type = other DNA
gagatatggatgggtggaggagatatgg

SEQ ID NO: 7244 - DNA, 28 bp, synthetic construct
  source 1..28: mol_type = other DNA
gagtaaaagagatatggatgggtggagg

SEQ ID NO: 7245 - DNA, 28 bp, synthetic construct
  source 1..28: mol_type = other DNA
tatgagtaaaagagatatggatgggtgg

SEQ ID NO: 7246 - DNA, 28 bp, synthetic construct
  source 1..28: mol_type = other DNA
gactatgagtaaaagagatatggatggg

SEQ ID NO: 7247 - DNA, 28 bp, synthetic construct
  source 1..28: mol_type = other DNA
cgactatgagtaaaagagatatggatgg

SEQ ID NO: 7248 - DNA, 28 bp, synthetic construct
  source 1..28: mol_type = other DNA
actacgactatgagtaaaagagatatgg

SEQ ID NO: 7249 - DNA, 28 bp, synthetic construct
  source 1..28: mol_type = other DNA
atagtcgtagtagctacatttactaagg

SEQ ID NO: 7250 - DNA, 28 bp, synthetic construct
  source 1..28: mol_type = other DNA
tagtcgtagtagctacatttactaaggg

SEQ ID NO: 7251 - DNA, 28 bp, synthetic construct
  source 1..28: mol_type = other DNA
agtcgtagtagctacatttactaagggg

SEQ ID NO: 7252 - DNA, 28 bp, synthetic construct
  source 1..28: mol_type = other DNA
ttaattcttttaaaatttattttaaagg

SEQ ID NO: 7253 - DNA, 28 bp, synthetic construct
  source 1..28: mol_type = other DNA
tgtgtagaagcatgtagcaaaacagtgg

SEQ ID NO: 7254 - DNA, 28 bp, synthetic construct
  source 1..28: mol_type = other DNA
aagcatgtagcaaaacagtggcttaagg

SEQ ID NO: 7255 - DNA, 28 bp, synthetic construct
  source 1..28: mol_type = other DNA
agcatgtagcaaaacagtggcttaaggg

SEQ ID NO: 7256 - DNA, 28 bp, synthetic construct
  source 1..28: mol_type = other DNA
taagtatattacttatattcatatctgg

SEQ ID NO: 7257 - DNA, 28 bp, synthetic construct
  source 1..28: mol_type = other DNA
tggcacatgctataacatgtattttggg

SEQ ID NO: 7258 - DNA, 28 bp, synthetic construct
  source 1..28: mol_type = other DNA
atggcacatgctataacatgtattttgg

SEQ ID NO: 7259 - DNA, 28 bp, synthetic construct
  source 1..28: mol_type = other DNA
tatagcatgtgccattccttttatatgg

SEQ ID NO: 7260 - DNA, 28 bp, synthetic construct
  source 1..28: mol_type = other DNA
gttgcaaaacaccatataaaaggaatgg

SEQ ID NO: 7261 - DNA, 28 bp, synthetic construct
  source 1..28: mol_type = other DNA
tttcagttgcaaaacaccatataaaagg

SEQ ID NO: 7262 - DNA, 28 bp, synthetic construct
  source 1..28: mol_type = other DNA
tgaaagagatgagttaatgagaaaatgg

SEQ ID NO: 7263 - DNA, 28 bp, synthetic construct
  source 1..28: mol_type = other DNA
gttaatgagaaaatggcattgcctatgg

SEQ ID NO: 7264 - DNA, 28 bp, synthetic construct
  source 1..28: mol_type = other DNA
atcaacatgatatgcttgataccatagg

SEQ ID NO: 7265 - DNA, 28 bp, synthetic construct
  source 1..28: mol_type = other DNA
atgttgatataaattacaagttttgagg

SEQ ID NO: 7266 - DNA, 28 bp, synthetic construct
  source 1..28: mol_type = other DNA
tataaattacaagttttgaggtgtatgg

SEQ ID NO: 7267 - RNA, 20 nt, synthetic construct
  source 1..20: mol_type = other RNA
acaaagacagtctaaccgtg

SEQ ID NO: 7268 - RNA, 20 nt, synthetic construct
  source 1..20: mol_type = other RNA
tagaccttgcagaagcgctg

SEQ ID NO: 7269 - RNA, 20 nt, synthetic construct
  source 1..20: mol_type = other RNA
acccgcatacaactgaaacg

SEQ ID NO: 7270 - RNA, 20 nt, synthetic construct
  source 1..20: mol_type = other RNA
aaatgcccaggtgactcacg

SEQ ID NO: 7271 - RNA, 20 nt, synthetic construct
  source 1..20: mol_type = other RNA
gaggagaaccgaaaacaaag

SEQ ID NO: 7272 - RNA, 20 nt, synthetic construct
  source 1..20: mol_type = other RNA
gtacctgttgctgacagaca

SEQ ID NO: 7273 - RNA, 20 nt, synthetic construct
  source 1..20: mol_type = other RNA
aaatccagtgctgttcaggg

SEQ ID NO: 7274 - RNA, 20 nt, synthetic construct
  source 1..20: mol_type = other RNA
ctgttgctgacagacagggt

SEQ ID NO: 7275 - RNA, 20 nt, synthetic construct
  source 1..20: mol_type = other RNA
agagtgggtactgaggagga

SEQ ID NO: 7276 - RNA, 20 nt, synthetic construct
  source 1..20: mol_type = other RNA
ccagtgtgagttaatctctg

SEQ ID NO: 7277 - RNA, 20 nt, synthetic construct
  source 1..20: mol_type = other RNA
gtaatgacaagatcaaacac

SEQ ID NO: 7278 - RNA, 20 nt, synthetic construct
  source 1..20: mol_type = other RNA
ttgtcattaccctgatctgt

SEQ ID NO: 7279 - RNA, 20 nt, synthetic construct
  source 1..20: mol_type = other RNA
gcaggcgggagctatcaccc

SEQ ID NO: 7280 - RNA, 20 nt, synthetic construct
  source 1..20: mol_type = other RNA
ctgcatgtaagacccagcaa

SEQ ID NO: 7281 - RNA, 20 nt, synthetic construct
  source 1..20: mol_type = other RNA
tctgttagtagataattagg

SEQ ID NO: 7282 - RNA, 20 nt, synthetic construct
  source 1..20: mol_type = other RNA
cagaatgactttttagtaca

SEQ ID NO: 7283 - RNA, 20 nt, synthetic construct
  source 1..20: mol_type = other RNA
ttcatcattccagttctaag

SEQ ID NO: 7284 - RNA, 20 nt, synthetic construct
  source 1..20: mol_type = other RNA
aattccacccactttcaaag

SEQ ID NO: 7285 - RNA, 20 nt, synthetic construct
  source 1..20: mol_type = other RNA
ttcgcccctttgaaagtggg

SEQ ID NO: 7286 - RNA, 20 nt, synthetic construct
  source 1..20: mol_type = other RNA
ccacttgttaacagagaccg

SEQ ID NO: 7287 - RNA, 20 nt, synthetic construct
  source 1..20: mol_type = other RNA
tgatgagatgagttgtgcca

SEQ ID NO: 7288 - RNA, 20 nt, synthetic construct
  source 1..20: mol_type = other RNA
aagacagttacagatgacac

SEQ ID NO: 7289 - RNA, 20 nt, synthetic construct
  source 1..20: mol_type = other RNA
ggggcacgcccagaatccca

SEQ ID NO: 7290 - RNA, 20 nt, synthetic construct
  source 1..20: mol_type = other RNA
ggtgttcacagacatgaaga

SEQ ID NO: 7291 - RNA, 20 nt, synthetic construct
  source 1..20: mol_type = other RNA
cgtgaagttgccgggcgttg

SEQ ID NO: 7292 - RNA, 20 nt, synthetic construct
  source 1..20: mol_type = other RNA
gttccaagtcagatccctcg

SEQ ID NO: 7293 - RNA, 20 nt, synthetic construct
  source 1..20: mol_type = other RNA
cttcaaaaggactacagcag

SEQ ID NO: 7294 - RNA, 20 nt, synthetic construct
  source 1..20: mol_type = other RNA
gggcgtcgtttccagctctg

SEQ ID NO: 7295 - RNA, 20 nt, synthetic construct
  source 1..20: mol_type = other RNA
cctccctgtgcaacgcatgg

SEQ ID NO: 7296 - RNA, 20 nt, synthetic construct
  source 1..20: mol_type = other RNA
gaaaacaaacgtgagtgaag

SEQ ID NO: 7297 - RNA, 20 nt, synthetic construct
  source 1..20: mol_type = other RNA
tagattttgctgctgcctca

SEQ ID NO: 7298 - RNA, 20 nt, synthetic construct
  source 1..20: mol_type = other RNA
tcagaatcagagatttcatg

SEQ ID NO: 7299 - RNA, 20 nt, synthetic construct
  source 1..20: mol_type = other RNA
ttcaaacatggtgcttccaa

SEQ ID NO: 7300 - RNA, 20 nt, synthetic construct
  source 1..20: mol_type = other RNA
aaaagcatcgaacacacggg

SEQ ID NO: 7301 - RNA, 20 nt, synthetic construct
  source 1..20: mol_type = other RNA
gaaccacacaaagcacctca

SEQ ID NO: 7302 - RNA, 20 nt, synthetic construct
  source 1..20: mol_type = other RNA
atggctaaccggaaacaggt

SEQ ID NO: 7303 - RNA, 20 nt, synthetic construct
  source 1..20: mol_type = other RNA
gcgctggctcgatctctgag

SEQ ID NO: 7304 - RNA, 20 nt, synthetic construct
  source 1..20: mol_type = other RNA
aacccgggagtgttcccagg

SEQ ID NO: 7305 - RNA, 20 nt, synthetic construct
  source 1..20: mol_type = other RNA
tgaagcagtcctgatgcgca

SEQ ID NO: 7306 - RNA, 20 nt, synthetic construct
  source 1..20: mol_type = other RNA
gaaaagacacacaagtcgcg

SEQ ID NO: 7307 - RNA, 20 nt, synthetic construct
  source 1..20: mol_type = other RNA
gccagatcctcatggcagcg

SEQ ID NO: 7308 - RNA, 20 nt, synthetic construct
  source 1..20: mol_type = other RNA
cctgcccggttcctttcctg

SEQ ID NO: 7309 - RNA, 20 nt, synthetic construct
  source 1..20: mol_type = other RNA
ctgataatcagttcacccca

SEQ ID NO: 7310 - RNA, 20 nt, synthetic construct
  source 1..20: mol_type = other RNA
aaatcgcttctagtccatca

SEQ ID NO: 7311 - RNA, 20 nt, synthetic construct
  source 1..20: mol_type = other RNA
aaagaagttagcttgaactg

SEQ ID NO: 7312 - RNA, 20 nt, synthetic construct
  source 1..20: mol_type = other RNA
atacccttacattatgtatg

SEQ ID NO: 7313 - RNA, 20 nt, synthetic construct
  source 1..20: mol_type = other RNA
gccctagaagtacaatagga

SEQ ID NO: 7314 - RNA, 20 nt, synthetic construct
  source 1..20: mol_type = other RNA
aagatatttcttcagctctg

SEQ ID NO: 7315 - RNA, 20 nt, synthetic construct
  source 1..20: mol_type = other RNA
agaggccaatttactccctg

SEQ ID NO: 7316 - RNA, 20 nt, synthetic construct
  source 1..20: mol_type = other RNA
caaggaggtaggacactcag

SEQ ID NO: 7317 - RNA, 20 nt, synthetic construct
  source 1..20: mol_type = other RNA
aatggtcacagggaaagatg

SEQ ID NO: 7318 - RNA, 20 nt, synthetic construct
  source 1..20: mol_type = other RNA
tcgtctgggaaaaacttagg

SEQ ID NO: 7319 - RNA, 20 nt, synthetic construct
  source 1..20: mol_type = other RNA
gataaaggctgccattttgg

SEQ ID NO: 7320 - RNA, 20 nt, synthetic construct
  source 1..20: mol_type = other RNA
tggtgagcagaaatagacaa

SEQ ID NO: 7321 - RNA, 20 nt, synthetic construct
  source 1..20: mol_type = other RNA
gcatgagacgtaggtcccag

SEQ ID NO: 7322 - RNA, 20 nt, synthetic construct
  source 1..20: mol_type = other RNA
tacctaagactggggccacg

SEQ ID NO: 7323 - RNA, 20 nt, synthetic construct
  source 1..20: mol_type = other RNA
gaaaaccctaaaaaccaccc

SEQ ID NO: 7324 - RNA, 20 nt, synthetic construct
  source 1..20: mol_type = other RNA
ctgcagaaaatcatcaactg

SEQ ID NO: 7325 - RNA, 20 nt, synthetic construct
  source 1..20: mol_type = other RNA
acgcaaaagaggcaagtcca

SEQ ID NO: 7326 - RNA, 20 nt, synthetic construct
  source 1..20: mol_type = other RNA
tggggtgaagaggcatttgg

SEQ ID NO: 7327 - RNA, 20 nt, synthetic construct
  source 1..20: mol_type = other RNA
catgtgtacatctgtccctg

SEQ ID NO: 7328 - RNA, 20 nt, synthetic construct
  source 1..20: mol_type = other RNA
cactaccaccaccaaagcca

SEQ ID NO: 7329 - RNA, 20 nt, synthetic construct
  source 1..20: mol_type = other RNA
aagttgtaggtcactcccag

SEQ ID NO: 7330 - RNA, 20 nt, synthetic construct
  source 1..20: mol_type = other RNA
agcaggttagggagccctgt

SEQ ID NO: 7331 - RNA, 20 nt, synthetic construct
  source 1..20: mol_type = other RNA
cgcaacctcccatggccaca

SEQ ID NO: 7332 - RNA, 20 nt, synthetic construct
  source 1..20: mol_type = other RNA
acccatagagcagttttgcg

SEQ ID NO: 7333 - RNA, 20 nt, synthetic construct
  source 1..20: mol_type = other RNA
gcaggggcacttcagaacca

SEQ ID NO: 7334 - RNA, 20 nt, synthetic construct
  source 1..20: mol_type = other RNA
ccacaaaccaaagatactgt

SEQ ID NO: 7335 - RNA, 20 nt, synthetic construct
  source 1..20: mol_type = other RNA
caaaccgtcttttctctcag

SEQ ID NO: 7336 - RNA, 20 nt, synthetic construct
  source 1..20: mol_type = other RNA
cacaggttcccccacccatg

SEQ ID NO: 7337 - RNA, 20 nt, synthetic construct
  source 1..20: mol_type = other RNA
aagaagagggtgtagacgga

SEQ ID NO: 7338 - RNA, 20 nt, synthetic construct
  source 1..20: mol_type = other RNA
ctttattgatgtgttacagg

SEQ ID NO: 7339 - RNA, 20 nt, synthetic construct
  source 1..20: mol_type = other RNA
aagacaatcacctcttgaaa

SEQ ID NO: 7340 - RNA, 20 nt, synthetic construct
  source 1..20: mol_type = other RNA
gtggtggtgaggcactgacg

SEQ ID NO: 7341 - RNA, 20 nt, synthetic construct
  source 1..20: mol_type = other RNA
gacggcggcgcctttatatg

SEQ ID NO: 7342 - RNA, 20 nt, synthetic construct
  source 1..20: mol_type = other RNA
ctcccaaaaccacatccagc

SEQ ID NO: 7343 - RNA, 20 nt, synthetic construct
  source 1..20: mol_type = other RNA
ctcctactgaacaaccaaca

SEQ ID NO: 7344 - RNA, 20 nt, synthetic construct
  source 1..20: mol_type = other RNA
tcagtaggagctgtggcgcg

SEQ ID NO: 7345 - RNA, 20 nt, synthetic construct
  source 1..20: mol_type = other RNA
gatgcgaacctcatgtgtcc

SEQ ID NO: 7346 - RNA, 20 nt, synthetic construct
  source 1..20: mol_type = other RNA
gtgattccgattgtcgtgcg

SEQ ID NO: 7347 - RNA, 20 nt, synthetic construct
  source 1..20: mol_type = other RNA
tgtcagggcgcgtcccaaga

SEQ ID NO: 7348 - RNA, 20 nt, synthetic construct
  source 1..20: mol_type = other RNA
atcggggtcgccaagtccga

SEQ ID NO: 7349 - RNA, 20 nt, synthetic construct
  source 1..20: mol_type = other RNA
gcgactgagggcgtcgacgg

SEQ ID NO: 7350 - RNA, 20 nt, synthetic construct
  source 1..20: mol_type = other RNA
cgtcgacggcgggtggagca

SEQ ID NO: 7351 - RNA, 20 nt, synthetic construct
  source 1..20: mol_type = other RNA
cggctctcgcgcatgctccg

SEQ ID NO: 7352 - RNA, 20 nt, synthetic construct
  source 1..20: mol_type = other RNA
gcgtccggcgaggaccgctt

SEQ ID NO: 7353 - RNA, 20 nt, synthetic construct
  source 1..20: mol_type = other RNA
ggccacataaaaacctggct

SEQ ID NO: 7354 - RNA, 20 nt, synthetic construct
  source 1..20: mol_type = other RNA
gcttaactgtatctggagcc

SEQ ID NO: 7355 - RNA, 20 nt, synthetic construct
  source 1..20: mol_type = other RNA
cttggttactggcctcacac

SEQ ID NO: 7356 - RNA, 20 nt, synthetic construct
  source 1..20: mol_type = other RNA
atttgcaatggcttgcagat

SEQ ID NO: 7357 - RNA, 20 nt, synthetic construct
  source 1..20: mol_type = other RNA
agagccgccccggagcgccc

SEQ ID NO: 7358 - RNA, 20 nt, synthetic construct
  source 1..20: mol_type = other RNA
cagtatctttgcacaaacca

SEQ ID NO: 7359 - RNA, 20 nt, synthetic construct
  source 1..20: mol_type = other RNA
cctcgtctccagccgagggc

SEQ ID NO: 7360 - RNA, 20 nt, synthetic construct
  source 1..20: mol_type = other RNA
gagggtacccacatggttcc

SEQ ID NO: 7361 - RNA, 20 nt, synthetic construct
  source 1..20: mol_type = other RNA
ctctccccaaaatgaagacg

SEQ ID NO: 7362 - RNA, 20 nt, synthetic construct
  source 1..20: mol_type = other RNA
accccctcaagaggtgagaa

SEQ ID NO: 7363 - RNA, 20 nt, synthetic construct
  source 1..20: mol_type = other RNA
ggtcattggtgtagcctcct

SEQ ID NO: 7364 - RNA, 20 nt, synthetic construct
  source 1..20: mol_type = other RNA
ctggtttgtgcaaagatact

SEQ ID NO: 7365 - RNA, 20 nt, synthetic construct
  source 1..20: mol_type = other RNA
ggcgaggcgcctcccgccct

SEQ ID NO: 7366 - RNA, 20 nt, synthetic construct
  source 1..20: mol_type = other RNA
gaccccttctcacctcttga

SEQ ID NO: 7367 - RNA, 20 nt, synthetic construct
  source 1..20: mol_type = other RNA
aggcgcctcccgccctcggc

SEQ ID NO: 7368 - RNA, 20 nt, synthetic construct
  source 1..20: mol_type = other RNA
cgcccagggcccggctcacc

SEQ ID NO: 7369 - RNA, 20 nt, synthetic construct
  source 1..20: mol_type = other RNA
gcgtcccgcgccccgccgcc

SEQ ID NO: 7370 - RNA, 20 nt, synthetic construct
  source 1..20: mol_type = other RNA
ccgcctcctcgcccagggcc

SEQ ID NO: 7371 - RNA, 20 nt, synthetic construct
  source 1..20: mol_type = other RNA
cgccccgccgccaggtgagc

SEQ ID NO: 7372 - RNA, 20 nt, synthetic construct
  source 1..20: mol_type = other RNA
gccccgccgccaggtgagcc

SEQ ID NO: 7373 - RNA, 20 nt, synthetic construct
  source 1..20: mol_type = other RNA
agcgtccgggggtgcgctgc

SEQ ID NO: 7374 - RNA, 20 nt, synthetic construct
  source 1..20: mol_type = other RNA
gcgctgcgggagagacaaag

SEQ ID NO: 7375 - RNA, 20 nt, synthetic construct
  source 1..20: mol_type = other RNA
tagcgtccgggggtgcgctg

SEQ ID NO: 7376 - RNA, 20 nt, synthetic construct
  source 1..20: mol_type = other RNA
accaaatcttgagaaatgga

SEQ ID NO: 7377 - RNA, 20 nt, synthetic construct
  source 1..20: mol_type = other RNA
ggcatagttagatctccctg

SEQ ID NO: 7378 - RNA, 20 nt, synthetic construct
  source 1..20: mol_type = other RNA
tgccaaccgattcatcatca

SEQ ID NO: 7379 - RNA, 20 nt, synthetic construct
  source 1..20: mol_type = other RNA
aggaactgagcccataatcg

SEQ ID NO: 7380 - RNA, 20 nt, synthetic construct
  source 1..20: mol_type = other RNA
gtttaggagtcggatggtca

SEQ ID NO: 7381 - RNA, 20 nt, synthetic construct
  source 1..20: mol_type = other RNA
accccaaaaagtctttttgg

SEQ ID NO: 7382 - RNA, 20 nt, synthetic construct
  source 1..20: mol_type = other RNA
taaatgcactgagaataggt

SEQ ID NO: 7383 - RNA, 20 nt, synthetic construct
  source 1..20: mol_type = other RNA
agaagttattgagtttctgt

SEQ ID NO: 7384 - RNA, 20 nt, synthetic construct
  source 1..20: mol_type = other RNA
caaagatctctcctgctctg

SEQ ID NO: 7385 - RNA, 20 nt, synthetic construct
  source 1..20: mol_type = other RNA
atacgtaatggaatgaaaag

SEQ ID NO: 7386 - RNA, 20 nt, synthetic construct
  source 1..20: mol_type = other RNA
gtgcacatcaaatgcccaca

SEQ ID NO: 7387 - RNA, 20 nt, synthetic construct
  source 1..20: mol_type = other RNA
aatcttacagagctgaaaag

SEQ ID NO: 7388 - RNA, 20 nt, synthetic construct
  source 1..20: mol_type = other RNA
gttatctttatcctgatggg

SEQ ID NO: 7389 - RNA, 20 nt, synthetic construct
  source 1..20: mol_type = other RNA
agatgcagagattttgctgg

SEQ ID NO: 7390 - RNA, 20 nt, synthetic construct
  source 1..20: mol_type = other RNA
agccctgattgatggcagca

SEQ ID NO: 7391 - RNA, 20 nt, synthetic construct
  source 1..20: mol_type = other RNA
gttgcactcgattgggacag

SEQ ID NO: 7392 - RNA, 20 nt, synthetic construct
  source 1..20: mol_type = other RNA
acttacttaggaacaaacca

SEQ ID NO: 7393 - RNA, 20 nt, synthetic construct
  source 1..20: mol_type = other RNA
aatatagcaccaaacccgga

SEQ ID NO: 7394 - RNA, 20 nt, synthetic construct
  source 1..20: mol_type = other RNA
aacctggacctgaaatttgg

SEQ ID NO: 7395 - RNA, 20 nt, synthetic construct
  source 1..20: mol_type = other RNA
tgagcagttaggtttaatgt

SEQ ID NO: 7396 - RNA, 20 nt, synthetic construct
  source 1..20: mol_type = other RNA
aaataaacagtgctattcca

SEQ ID NO: 7397 - RNA, 20 nt, synthetic construct
  source 1..20: mol_type = other RNA
acgtagactaagttgaccct

SEQ ID NO: 7398 - RNA, 20 nt, synthetic construct
  source 1..20: mol_type = other RNA
taccatatccaactggaggg

SEQ ID NO: 7399 - RNA, 20 nt, synthetic construct
  source 1..20: mol_type = other RNA
gatttcgtctgtaggcacaa

SEQ ID NO: 7400 - RNA, 20 nt, synthetic construct
  source 1..20: mol_type = other RNA
atcaaagcaatctttcccaa

SEQ ID NO: 7401 - RNA, 20 nt, synthetic construct
  source 1..20: mol_type = other RNA
tgaacatctagtagatctgg

SEQ ID NO: 7402 - RNA, 20 nt, synthetic construct
  source 1..20: mol_type = other RNA
tttaccccaaaacaattaca

SEQ ID NO: 7403 - RNA, 20 nt, synthetic construct
  source 1..20: mol_type = other RNA
aagactctttaaagaaggca

SEQ ID NO: 7404 - RNA, 20 nt, synthetic construct
  source 1..20: mol_type = other RNA
aaagacaccaatagagtgaa

SEQ ID NO: 7405 - RNA, 20 nt, synthetic construct
  source 1..20: mol_type = other RNA
ttctaaattctaaagccctg

SEQ ID NO: 7406 - RNA, 20 nt, synthetic construct
  source 1..20: mol_type = other RNA
attgttgccataacaatggt

SEQ ID NO: 7407 - RNA, 20 nt, synthetic construct
  source 1..20: mol_type = other RNA
ccccacttcaaactggacgg

SEQ ID NO: 7408 - RNA, 20 nt, synthetic construct
  source 1..20: mol_type = other RNA
cctgatttgataaagcagtg

SEQ ID NO: 7409 - RNA, 20 nt, synthetic construct
  source 1..20: mol_type = other RNA
attcaccacagaaaacccca

SEQ ID NO: 7410 - RNA, 20 nt, synthetic construct
  source 1..20: mol_type = other RNA
atttctggtgcagtcctgcg

SEQ ID NO: 7411 - RNA, 20 nt, synthetic construct
  source 1..20: mol_type = other RNA
gacccttttaagttgcagtg

SEQ ID NO: 7412 - RNA, 20 nt, synthetic construct
  source 1..20: mol_type = other RNA
tgtatgctgaatggaacaca

SEQ ID NO: 7413 - RNA, 20 nt, synthetic construct
  source 1..20: mol_type = other RNA
tagtcccaaacacatcccga

SEQ ID NO: 7414 - RNA, 20 nt, synthetic construct
  source 1..20: mol_type = other RNA
ttccgcaaaatagagcccca

SEQ ID NO: 7415 - RNA, 20 nt, synthetic construct
  source 1..20: mol_type = other RNA
tgtgggatgtcgactcctag

SEQ ID NO: 7416 - RNA, 20 nt, synthetic construct
  source 1..20: mol_type = other RNA
cagctccctctagtcccgcg

SEQ ID NO: 7417 - RNA, 20 nt, synthetic construct
  source 1..20: mol_type = other RNA
ggttcagaccagtactctcg

SEQ ID NO: 7418 - RNA, 19 nt, synthetic construct
  source 1..19: mol_type = other RNA
acgcctgcggattctactg

SEQ ID NO: 7419 - RNA, 20 nt, synthetic construct
  source 1..20: mol_type = other RNA
tatgccatgagtgctcagag

SEQ ID NO: 7420 - RNA, 20 nt, synthetic construct
  source 1..20: mol_type = other RNA
cttgtggcgctgaaaacgaa
